(19) United States
(12) Patent Application Publication
(10) Pub. No.: US 2024/0110167 A1
(43) Pub. Date: Apr. 4, 2024

(54) ENZYMES WITH RUVC DOMAINS

(71) Applicant: Metagenomi, Inc., Emeryville, CA (US)

(72) Inventors: Brian C. THOMAS, Berkeley, CA (US); Christopher BROWN, Albany, CA (US); Daniela S.A. GOLTSMAN, Oakland, CA (US); Cristina BUTTERFIELD, Oakland, CA (US); Lisa ALEXANDER, Albany, CA (US); Cindy CASTELLE, San Francisco, CA (US)

(21) Appl. No.: 18/488,520

(22) Filed: Oct. 17, 2023

Related U.S. Application Data
(63) Continuation of application No. PCT/US2022/027124, filed on Apr. 29, 2022.
(60) Provisional application No. 63/182,438, filed on Apr. 30, 2021.

(51) Int. Cl. C12N 9/22; C12N 15/10; C12N 15/113

(52) U.S. Cl. CPC C12N 9/22; C12N 15/102; C12N 15/113

(57) ABSTRACT

The present disclosure provides for endonuclease enzymes having distinguishing domain features, as well as methods of using such enzymes or variants thereof.

### CROSS-REFERENCE

[0001] This application is a continuation of International Application No. PCT/US2022/027124, filed Apr. 29, 2022, which claims the benefit of U.S. Provisional Application No. 63/182,438, filed on Apr. 30, 2021, each of which is incorporated by reference herein in its entirety.

### BACKGROUND

[0002] Cas enzymes along with their associated Clustered Regularly Interspaced Short Palindromic Repeats (CRISPR) guide ribonucleic acids (RNAs) appear to be a pervasive (˜45% of bacteria, ˜84% of archaea) component of prokaryotic immune systems, serving to protect such microorganisms against non-self nucleic acids, such as infectious viruses and plasmids by CRISPR-RNA guided nucleic acid cleavage. While the deoxyribonucleic acid (DNA) elements encoding CRISPR RNA elements may be relatively conserved in structure and length, their CRISPR-associated (Cas) proteins are highly diverse, containing a wide variety of nucleic acid-interacting domains. While CRISPR DNA elements have been observed as early as 1987, the programmable endonuclease cleavage ability of CRISPR/Cas complexes has only been recognized relatively recently, leading to the use of recombinant CRISPR/Cas systems in diverse DNA manipulation and gene editing applications.

### SEQUENCE LISTING

[0003] The instant application contains a Sequence Listing which has been submitted electronically in XML format and is hereby incorporated by reference in its entirety. Said XML copy, created on Oct. 12, 2023, is named 55921_722_601_Sequence_Listing_Final.xml and is 3,588,096 bytes in size.

### SUMMARY

[0004] In some aspects, the present disclosure provides for an engineered nuclease system comprising:(a) an endonuclease configured to bind to a protospacer adjacent motif (PAM) sequence comprising SEQ ID NOs: 550-567, wherein said endonuclease is a class 2, type II Cas endonuclease; and (b) an engineered guide ribonucleic acid structure configured to form a complex with said endonuclease comprising: (i) a guide ribonucleic acid sequence configured to hybridize to a target deoxyribonucleic acid sequence; and (ii) a tracr ribonucleic acid sequence configured to bind to said endonuclease. In some embodiments, said endonuclease is derived from an uncultivated microorganism. In some embodiments, said endonuclease has not been engineered to bind to a different PAM sequence. In some embodiments, said endonuclease is not a Cas9 endonuclease, a Cas14 endonuclease, a Cas12a endonuclease, a Cas12b endonuclease, a Cas 12c endonuclease, a Cas12d endonuclease, a Cas12e endonuclease, a Cas13a endonuclease, a Cas13b endonuclease, a Cas13c endonuclease, or a Cas 13d endonuclease. In some embodiments, said endonuclease has less than 80% identity to a Cas9 endonuclease. In some embodiments, said endonuclease further comprises an HNH domain In some embodiments, said engineered guide ribonucleic acid structure comprises at least two ribonucleic acid polynucleotides. In some embodiments, said engineered guide ribonucleic acid structure comprises one ribonucleic acid polynucleotide comprising said guide ribonucleic acid sequence and said tracr ribonucleic acid sequence. In some embodiments, said guide ribonucleic acid sequence is complementary to a prokaryotic, bacterial, archaeal, eukaryotic, fungal, plant, mammalian, or human genomic sequence. In some embodiments, said guide ribonucleic acid sequence is 15-24 nucleotides in length. In some embodiments, said endonuclease comprises one or more nuclear localization sequences (NLSs) proximal to an N- or C-terminus of said endonuclease. In some embodiments, said NLS comprises a sequence selected from SEQ ID NOs: 586-601. In some embodiments, the engineered nuclease system further comprises a single- or double-stranded DNA repair template comprising from 5′ to 3′: a first homology arm comprising a sequence of at least 20 nucleotides 5′ to said target deoxyribonucleic acid sequence, a synthetic DNA sequence of at least 10 nucleotides, and a second homology arm comprising a sequence of at least 20 nucleotides 3′ to said target sequence. In some embodiments, said first or second homology arm comprises a sequence of at least 40, 80, 120, 150, 200, 300, 500, or 1,000 nucleotides. In some embodiments, said system further comprises a source of Mg²⁺. In some embodiments, said endonuclease and said tracr ribonucleic acid sequence are derived from distinct bacterial species within a same phylum. In some embodiments, said endonuclease comprises SEQ ID NOs: 1-549 or 602-1276, or a variant thereof having at least 55% identity thereto.

[0005] In one aspect, the present disclosure provides for an engineered nuclease system comprising: (a) an endonuclease configured to have selectivity for a protospacer adjacent motif (PAM) sequence comprising any one of SEQ ID NOs: 550-567, wherein the endonuclease is a class 2, type II Cas endonuclease. In some embodiments, the system further comprises (b) an engineered guide nucleic acid structure configured to form a complex with the endonuclease comprising: (i) a targeting nucleic acid sequence configured to hybridize to a target deoxyribonucleic acid sequence; and (ii) a tracr ribonucleic acid sequence configured to bind to the endonuclease. In some embodiments, the endonuclease is derived from an uncultivated microorganism. In some embodiments, the endonuclease has not been engineered to bind to a different PAM sequence than a native PAM sequence of the endonuclease. In some embodiments, the endonuclease is not a Cas9 endonuclease, a Cas14 endonuclease, a Cas12a endonuclease, a Cas12b endonuclease, a Cas 12c endonuclease, a Cas12d endonuclease, a Cas12e endonuclease, a Cas13a endonuclease, a Cas13b endonuclease, a Cas13c endonuclease, or a Cas 13d endonuclease. In some embodiments, the endonuclease has less than 80% identity to a Cas9 endonuclease. In some embodiments, the endonuclease further comprises a PI domain comprising a sequence having at least about 80%, at least about 85%, at least about 86%, at least about 87%, at least about 88%, at least about 89%, at least about 90%, at least about 91%, at least about 92%, at least about 93%, at least about 94%, at least about 95%, at least about 96%, at least about 97%, at least about 98%, or at least about 99% sequence identity to any one of SEQ ID NOs: 1277-1641 or 1683, or a variant thereof. In some embodiments, the endonuclease further comprises a PI domain having at least about 80%, at least about 85%, at least about 86%, at least about 87%, at least about 88%, at least about 89%, at least about 90%, at least about 91%, at least about 92%, at least about 93%, at least about 94%, at least about 95%, at least about 96%, at least about 97%, at least about 98%, or at least about 99% sequence identity to a PI domain of any one of SEQ ID NOs: 1-549 or 602-1276. In some embodiments, the endonuclease further comprises a PI domain comprising a sequence having at least about 80%, at least about 85%, at least about 86%, at least about 87%, at least about 88%, at least about 89%, at least about 90%, at least about 91%, at least about 92%, at least about 93%, at least about 94%, at least about 95%, at least about 96%, at least about 97%, at least about 98%, or at least about 99% sequence identity to any one of SEQ ID NOs: 1, 217, 258, 259, 284, 296, 297, 306, 357, 403, 404, 405, 463, 464, 465, 356, or 484, or a variant thereof. In some embodiments, the endonuclease further comprises a PI domain comprising a sequence having at least about 80%, at least about 85%, at least about 86%, at least about 87%, at least about 88%, at least about 89%, at least about 90%, at least about 91%, at least about 92%, at least about 93%, at least about 94%, at least about 95%, at least about 96%, at least about 97%, at least about 98%, or at least about 99% sequence identity to any one of SEQ ID NOs: 259, 296, or 484, or a variant thereof. In some embodiments, the endonuclease further comprises a RuvC domain In some embodiments, the RuvC domain has at least about 80%, at least about 85%, at least about 86%, at least about 87%, at least about 88%, at least about 89%, at least about 90%, at least about 91%, at least about 92%, at least about 93%, at least about 94%, at least about 95%, at least about 96%, at least about 97%, at least about 98%, or at least about 99% sequence identity to a RuvC domain of any one of SEQ ID NOs: 1, 217, 258, 259, 284, 296, 297, 306, 357, 403, 404, 405, 463, 464, 465, 356, or 484, or a variant thereof. In some embodiments, the RuvC domain has at least about 80%, at least about 85%, at least about 86%, at least about 87%, at least about 88%, at least about 89%, at least about 90%, at least about 91%, at least about 92%, at least about 93%, at least about 94%, at least about 95%, at least about 96%, at least about 97%, at least about 98%, or at least about 99% sequence identity to a RuvC domain of any one of SEQ ID NOs: 259, 296, or 484, or a variant thereof. In some embodiments, the endonuclease further comprises an HNH domain In some embodiments, the HNH domain has at least about 80%, at least about 85%, at least about 86%, at least about 87%, at least about 88%, at least about 89%, at least about 90%, at least about 91%, at least about 92%, at least about 93%, at least about 94%, at least about 95%, at least about 96%, at least about 97%, at least about 98%, or at least about 99% sequence identity to an HNH domain of any one of SEQ ID NOs: 1, 217, 258, 259, 284, 296, 297, 306, 357, 403, 404, 405, 463, 464, 465, 356, or 484, or a variant thereof. In some embodiments, the HNH domain has at least about 80%, at least about 85%, at least about 86%, at least about 87%, at least about 88%, at least about 89%, at least about 90%, at least about 91%, at least about 92%, at least about 93%, at least about 94%, at least about 95%, at least about 96%, at least about 97%, at least about 98%, or at least about 99% sequence identity to an HNH domain of any one of SEQ ID NOs: 259, 296, or 484, or a variant thereof. In some embodiments, the endonuclease is configured to have selectivity for a PAM sequence comprising any one of SEQ ID NOs: 553, 555, or 566, or a variant thereof. In some embodiments, the engineered guide nucleic acid structure comprises at least two ribonucleic acid polynucleotides. In some embodiments, the engineered guide nucleic acid structure comprises one ribonucleic acid polynucleotide comprising the guide ribonucleic acid sequence and the tracr ribonucleic acid sequence. In some embodiments, the engineered guide nucleic acid structure comprises a tracr sequence having at least about 80%, at least about 85%, at least about 86%, at least about 87%, at least about 88%, at least about 89%, at least about 90%, at least about 91%, at least about 92%, at least about 93%, at least about 94%, at least about 95%, at least about 96%, at least about 97%, at least about 98%, or at least about 99% sequence identity to any one of SEQ ID NOs: 1645-1662 or wherein the engineered guide nucleic acid structure comprises a sequence having at least about 80%, at least about 85%, at least about 86%, at least about 87%, at least about 88%, at least about 89%, at least about 90%, at least about 91%, at least about 92%, at least about 93%, at least about 94%, at least about 95%, at least about 96%, at least about 97%, at least about 98%, or at least about 99% sequence identity to non-degenerate nucleotides of any one of SEQ ID NOs: 568-585 or 1643-1644. In some embodiments, the engineered guide nucleic acid structure comprises a tracr sequence having at least about 80%, at least about 85%, at least about 86%, at least about 87%, at least about 88%, at least about 89%, at least about 90%, at least about 91%, at least about 92%, at least about 93%, at least about 94%, at least about 95%, at least about 96%, at least about 97%, at least about 98%, or at least about 99% sequence identity to any one of SEQ ID NOs: 1648, 1650, or 1661 or wherein the engineered guide nucleic acid structure comprises a sequence having at least about 80%, at least about 85%, at least about 86%, at least about 87%, at least about 88%, at least about 89%, at least about 90%, at least about 91%, at least about 92%, at least about 93%, at least about 94%, at least about 95%, at least about 96%, at least about 97%, at least about 98%, or at least about 99% sequence identity to non-degenerate nucleotides of any one of SEQ ID NOs: 571, 573, or 584. In some embodiments, the targeting nucleic acid sequence is complementary to a prokaryotic, bacterial, archaeal, eukaryotic, fungal, plant, mammalian, or human genomic sequence. In some embodiments, the targeting nucleic acid sequence is 15-24 nucleotides in length. In some embodiments, the endonuclease comprises one or more nuclear localization sequences (NLSs) proximal to an N- or C-terminus of the endonuclease. the NLS comprises a sequence comprising any one of SEQ ID NOs: 586-601, or a variant thereof. In some embodiments, the system further comprises a single- or double-stranded DNA repair template comprising from 5′ to 3′: a first homology arm comprising a sequence of at least 20 nucleotides 5′ to the target deoxyribonucleic acid sequence, a synthetic DNA sequence of at least 10 nucleotides, and a second homology arm comprising a sequence of at least 20 nucleotides 3′ to the target sequence. In some embodiments, the first or second homology arm comprises a sequence of at least 40, 80, 120, 150, 200, 300, 500, or 1,000 nucleotides. In some embodiments, the system further comprises a source of Mg²⁺. In some embodiments, the endonuclease and the tracr ribonucleic acid sequence are derived from distinct bacterial species within a same phylum. In some embodiments, the endonuclease comprises any one of SEQ ID NOs: 1, 217, 258, 259, 284, 296, 297, 306, 357, 403, 404, 405, 463, 464, 465, 356, or 484:or a variant thereof having at least 55% identity thereto. In some embodiments, the sequence identity is determined by a BLASTP, CLUSTALW, MUSCLE, MAFFT algorithm, or a CLUSTALW algorithm with the Smith-Waterman homology search algorithm parameters. In some embodiments, the sequence identity is determined by the BLASTP homology search algorithm using parameters of a wordlength (W) of 3, an expectation (E) of 10, and a BLOSUM62 scoring matrix setting gap costs at existence of 11, extension of 1, and using a conditional compositional score matrix adjustment. In some embodiments, the PAM sequence is 3′ to the target deoxyribonucleic acid sequence

[0006] In some aspects, the present disclosure provides for a nucleic acid comprising an engineered nucleic acid sequence optimized for expression in an organism, wherein the nucleic acid encodes a class 2, type II Cas endonuclease configured to be selective for a protospacer adjacent motif (PAM) comprising any one of SEQ ID NOs: 550-567. In some embodiments, the endonuclease further comprises a PI domain comprising a sequence having at least at least about 80%, at least about 85%, at least about 86%, at least about 87%, at least about 88%, at least about 89%, at least about 90%, at least about 91%, at least about 92%, at least about 93%, at least about 94%, at least about 95%, at least about 96%, at least about 97%, at least about 98%, or at least about 99% sequence identity to any one of SEQ ID NOs: 1277-1641 or 1683, or a variant thereof, or wherein the endonuclease further comprises a PI domain having at least about 80%, at least about 85%, at least about 86%, at least about 87%, at least about 88%, at least about 89%, at least about 90%, at least about 91%, at least about 92%, at least about 93%, at least about 94%, at least about 95%, at least about 96%, at least about 97%, at least about 98%, or at least about 99% sequence identity to a PI domain of any one of SEQ ID NOs: 1-549 or 602-1276. In some embodiments, the endonuclease further comprises a PI domain comprising a sequence having at least about 80%, at least about 85%, at least about 86%, at least about 87%, at least about 88%, at least about 89%, at least about 90%, at least about 91%, at least about 92%, at least about 93%, at least about 94%, at least about 95%, at least about 96%, at least about 97%, at least about 98%, or at least about 99% sequence identity to any one of SEQ ID NOs: 1, 217, 258, 259, 284, 296, 297, 306, 357, 403, 404, 405, 463, 464, 465, 356, or 484, or a variant thereof. In some embodiments, the endonuclease further comprises a PI domain comprising a sequence having at least about 80%, at least about 85%, at least about 86%, at least about 87%, at least about 88%, at least about 89%, at least about 90%, at least about 91%, at least about 92%, at least about 93%, at least about 94%, at least about 95%, at least about 96%, at least about 97%, at least about 98%, or at least about 99% sequence identity to any one of SEQ ID NOs: 259, 296, or 484, or a variant thereof. In some embodiments, the endonuclease further comprises a RuvC domain In some embodiments, the RuvC domain has at least about 80%, at least about 85%, at least about 86%, at least about 87%, at least about 88%, at least about 89%, at least about 90%, at least about 91%, at least about 92%, at least about 93%, at least about 94%, at least about 95%, at least about 96%, at least about 97%, at least about 98%, or at least about 99% sequence identity to a RuvC domain of any one of SEQ ID NOs: 1, 217, 258, 259, 284, 296, 297, 306, 357, 403, 404, 405, 463, 464, 465, 356, or 484, or a variant thereof. In some embodiments, the RuvC domain has at least about 80%, at least about 85%, at least about 86%, at least about 87%, at least about 88%, at least about 89%, at least about 90%, at least about 91%, at least about 92%, at least about 93%, at least about 94%, at least about 95%, at least about 96%, at least about 97%, at least about 98%, or at least about 99% sequence identity to a RuvC domain of any one of SEQ ID NOs: 259, 296, or 484, or a variant thereof. In some embodiments, the endonuclease further comprises an HNH domain. In some embodiments, the HNH domain has at least about 80%, at least about 85%, at least about 86%, at least about 87%, at least about 88%, at least about 89%, at least about 90%, at least about 91%, at least about 92%, at least about 93%, at least about 94%, at least about 95%, at least about 96%, at least about 97%, at least about 98%, or at least about 99% sequence identity to an HNH domain of any one of SEQ ID NOs: 1, 217, 258, 259, 284, 296, 297, 306, 357, 403, 404, 405, 463, 464, 465, 356, or 484, or a variant thereof. In some embodiments, the HNH domain has at least about 80%, at least about 85%, at least about 86%, at least about 87%, at least about 88%, at least about 89%, at least about 90%, at least about 91%, at least about 92%, at least about 93%, at least about 94%, at least about 95%, at least about 96%, at least about 97%, at least about 98%, or at least about 99% sequence identity to an HNH domain of any one of SEQ ID NOs: 259, 296, or 484, or a variant thereof. In some embodiments, the endonuclease comprises any one of SEQ ID NOs: 1, 217, 258, 259, 284, 296, 297, 306, 357, 403, 404, 405, 463, 464, 465, 356, or 484, or a variant thereof having at least 55%, at least about 80%, at least about 85%, at least about 86%, at least about 87%, at least about 88%, at least about 89%, at least about 90%, at least about 91%, at least about 92%, at least about 93%, at least about 94%, at least about 95%, at least about 96%, at least about 97%, at least about 98%, or at least about 99% sequence identity thereto. In some embodiments, the organism is a bacterial, archaeal, eukaryotic, fungal, plant, mammalian, or human organism,

[0007] In some aspects, the present disclosure provides for an engineered nuclease system comprising: (a) an endonuclease having at least about 80%, at least about 85%, at least about 86%, at least about 87%, at least about 88%, at least about 89%, at least about 90%, at least about 91%, at least about 92%, at least about 93%, at least about 94%, at least about 95%, at least about 96%, at least about 97%, at least about 98%, or at least about 99% sequence identity to any one of SEQ ID NOs: 1-549, 602-1276, or a variant thereof; and (b) an engineered guide nucleic acid structure, wherein the engineered guide RNA is configured to form a complex with the endonuclease and the engineered guide RNA comprises a targeting nucleic acid sequence configured to hybridize to a target nucleic acid sequence. In some embodiments, the endonuclease comprises any one of SEQ ID NOs: 1, 217, 258, 259, 284, 296, 297, 306, 357, 403, 404, 405, 463, 464, 465, 356, or 484, or a variant thereof having at least 55% identity, at least about 80%, at least about 85%, at least about 86%, at least about 87%, at least about 88%, at least about 89%, at least about 90%, at least about 91%, at least about 92%, at least about 93%, at least about 94%, at least about 95%, at least about 96%, at least about 97%, at least about 98%, or at least about 99% sequence identity thereto. In some embodiments, the endonuclease further comprises a RuvC domain In some embodiments, the RuvC domain has at least about 80%, at least about 85%, at least about 86%, at least about 87%, at least about 88%, at least about 89%, at least about 90%, at least about 91%, at least about 92%, at least about 93%, at least about 94%, at least about 95%, at least about 96%, at least about 97%, at least about 98%, or at least about 99% sequence identity to a RuvC domain of any one of SEQ ID NOs: 1, 217, 258, 259, 284, 296, 297, 306, 357, 403, 404, 405, 463, 464, 465, 356, or 484, or a variant thereof. In some embodiments, the RuvC domain has at least about 80%, at least about 85%, at least about 86%, at least about 87%, at least about 88%, at least about 89%, at least about 90%, at least about 91%, at least about 92%, at least about 93%, at least about 94%, at least about 95%, at least about 96%, at least about 97%, at least about 98%, or at least about 99% sequence identity to a RuvC domain of any one of SEQ ID NOs: 259, 296, or 484, or a variant thereof In some embodiments, the endonuclease further comprises an HNH domain In some embodiments, the HNH domain at least about 80%, at least about 85%, at least about 86%, at least about 87%, at least about 88%, at least about 89%, at least about 90%, at least about 91%, at least about 92%, at least about 93%, at least about 94%, at least about 95%, at least about 96%, at least about 97%, at least about 98%, or at least about 99% sequence identity to an HNH domain of any one of SEQ ID NOs: 1, 217, 258, 259, 284, 296, 297, 306, 357, 403, 404, 405, 463, 464, 465, 356, or 484, or a variant thereof. In some embodiments, the HNH domain has at least about 80%, at least about 85%, at least about 86%, at least about 87%, at least about 88%, at least about 89%, at least about 90%, at least about 91%, at least about 92%, at least about 93%, at least about 94%, at least about 95%, at least about 96%, at least about 97%, at least about 98%, or at least about 99% sequence identity to an HNH domain of any one of SEQ ID NOs: 259, 296, or 484, or a variant thereof. In some embodiments, the engineered guide nucleic acid structure comprises a tracr sequence having at least about 80%, at least about 85%, at least about 86%, at least about 87%, at least about 88%, at least about 89%, at least about 90%, at least about 91%, at least about 92%, at least about 93%, at least about 94%, at least about 95%, at least about 96%, at least about 97%, at least about 98%, or at least about 99% sequence identity to any one of SEQ ID NOs: 1645-1662 or wherein the engineered guide nucleic acid structure comprises a sequence having at least 80% identity to non-degenerate nucleotides of any one of SEQ ID NOs: 568-585 or 1643-1644. In some embodiments, the engineered guide nucleic acid structure comprises a tracr sequence having at least about 80%, at least about 85%, at least about 86%, at least about 87%, at least about 88%, at least about 89%, at least about 90%, at least about 91%, at least about 92%, at least about 93%, at least about 94%, at least about 95%, at least about 96%, at least about 97%, at least about 98%, or at least about 99% sequence identity to any one of SEQ ID NOs: 1648, 1650, or 1661 or wherein the engineered guide nucleic acid structure comprises a sequence having at least about 80%, at least about 85%, at least about 86%, at least about 87%, at least about 88%, at least about 89%, at least about 90%, at least about 91%, at least about 92%, at least about 93%, at least about 94%, at least about 95%, at least about 96%, at least about 97%, at least about 98%, or at least about 99% sequence identity to non-degenerate nucleotides of any one of SEQ ID NOs: 571, 573, or 584. In some embodiments, the engineered guide nucleic acid structure is configured to form a complex with the endonuclease and comprises (i) a targeting nucleic acid sequence configured to hybridize to a target deoxyribonucleic acid sequence; and (ii) a tracr ribonucleic acid sequence configured to bind to the endonuclease. In some embodiments, the targeting nucleic acid sequence is complementary to a bacterial, archaeal, eukaryotic, fungal, plant, mammalian, or human genomic sequence. In some embodiments, the targeting nucleic acid sequence is 15-24 nucleotides in length.

[0008] In some aspects, the present disclosure provides for an engineered nuclease system comprising: (a) an engineered guide nucleic acid structure comprising: (i) a tracr sequence having at least about 80%, at least about 85%, at least about 86%, at least about 87%, at least about 88%, at least about 89%, at least about 90%, at least about 91%, at least about 92%, at least about 93%, at least about 94%, at least about 95%, at least about 96%, at least about 97%, at least about 98%, or at least about 99% sequence identity to any one of SEQ ID NOs: 1645-1662; or (ii) a sequence having at least about 80%, at least about 85%, at least about 86%, at least about 87%, at least about 88%, at least about 89%, at least about 90%, at least about 91%, at least about 92%, at least about 93%, at least about 94%, at least about 95%, at least about 96%, at least about 97%, at least about 98%, or at least about 99% sequence identity to non- degenerate nucleotides of any one of SEQ ID NOs: 568-585 or 1643-1644, and (b) a class 2, type II Cas endonuclease configured to bind to the engineered guide nucleic acid structure. In some embodiments, the engineered guide nucleic acid structure comprises a tracr sequence having at least 80% identity to any one of SEQ ID NOs: 1648, 1650, or 1661 or wherein the engineered guide nucleic acid structure comprises a sequence having at least 80% identity to non-degenerate nucleotides of any one of SEQ ID NOs: 571, 573, or 584. In some embodiments, the engineered guide nucleic acid structure is configured to form a complex with the endonuclease and comprises (i) a targeting nucleic acid sequence configured to hybridize to a target deoxyribonucleic acid sequence; and (ii) a tracr ribonucleic acid sequence configured to bind to the endonuclease. In some embodiments, the targeting nucleic acid sequence is complementary to a bacterial, archaeal, eukaryotic, fungal, plant, mammalian, or human genomic sequence. In some embodiments, the targeting nucleic acid sequence is 15-24 nucleotides in length. In some embodiments, the endonuclease comprises a sequence having at least about 80%, at least about 85%, at least about 86%, at least about 87%, at least about 88%, at least about 89%, at least about 90%, at least about 91%, at least about 92%, at least about 93%, at least about 94%, at least about 95%, at least about 96%, at least about 97%, at least about 98%, or at least about 99% sequence identity to any one of SEQ ID NOs: 1-549, 602-1276, or a variant thereof. In some embodiments, the endonuclease comprises a sequence according to any one of SEQ ID NOs: 1, 217, 258, 259, 284, 296, 297, 306, 357, 403, 404, 405, 463, 464, 465, 356, or 484, or a variant thereof having at least 55%, at least about 80%, at least about 85%, at least about 86%, at least about 87%, at least about 88%, at least about 89%, at least about 90%, at least about 91%, at least about 92%, at least about 93%, at least about 94%, at least about 95%, at least about 96%, at least about 97%, at least about 98%, or at least about 99% sequence identity thereto.

[0009] In some aspects, the present disclosure provides for an engineered guide nucleic acid structure comprising: (a) a targeting nucleic acid sequence comprising a nucleotide sequence that is complementary to a target sequence in a target DNA molecule; and (b) a protein-binding segment comprising two complementary stretches of nucleotides that hybridize to form a double-stranded RNA (dsRNA) duplex, one of which comprising a tracr sequence, wherein the two complementary stretches of nucleotides are covalently linked to one another with intervening nucleotides, and wherein the engineered guide ribonucleic acid polynucleotide is capable of forming a complex with an endonuclease having at least about 80%, at least about 85%, at least about 86%, at least about 87%, at least about 88%, at least about 89%, at least about 90%, at least about 91%, at least about 92%, at least about 93%, at least about 94%, at least about 95%, at least about 96%, at least about 97%, at least about 98%, or at least about 99% sequence identity to any one of SEQ ID NOs: 1-549, 602-1276, or a variant thereof, and targeting the complex to the target sequence of the target DNA molecule. In some embodiments, the endonuclease comprises any one of SEQ ID NOs: 1, 217, 258, 259, 284, 296, 297, 306, 357, 403, 404, 405, 463, 464, 465, 356, or 484, or a variant thereof having at least 55%, at least about 80%, at least about 85%, at least about 86%, at least about 87%, at least about 88%, at least about 89%, at least about 90%, at least about 91%, at least about 92%, at least about 93%, at least about 94%, at least about 95%, at least about 96%, at least about 97%, at least about 98%, or at least about 99% sequence identity thereto. In some embodiments, the targeting nucleic acid sequence is complementary to a bacterial, archaeal, eukaryotic, fungal, plant, mammalian, or human genomic sequence. In some embodiments, the targeting nucleic acid sequence is 15-24 nucleotides in length. In some embodiments, the engineered guide nucleic acid structure comprises a tracr sequence having at least 80% identity to any one of SEQ ID NOs: 1645-1662 or wherein the engineered guide nucleic acid structure comprises a sequence having at least about 80%, at least about 85%, at least about 86%, at least about 87%, at least about 88%, at least about 89%, at least about 90%, at least about 91%, at least about 92%, at least about 93%, at least about 94%, at least about 95%, at least about 96%, at least about 97%, at least about 98%, or at least about 99% sequence identity to non-degenerate nucleotides of any one of SEQ ID NOs: 568-585 or 1643-1644. In some embodiments, the engineered guide nucleic acid structure comprises a tracr sequence having at least 80% identity to any one of SEQ ID NOs: 1648, 1650, or 1661 or wherein the engineered guide nucleic acid structure comprises a sequence having at least about 80%, at least about 85%, at least about 86%, at least about 87%, at least about 88%, at least about 89%, at least about 90%, at least about 91%, at least about 92%, at least about 93%, at least about 94%, at least about 95%, at least about 96%, at least about 97%, at least about 98%, or at least about 99% sequence identity to non-degenerate nucleotides of any one of SEQ ID NOs: 571, 573, or 584.

[0010] In some aspects, the present disclosure provides for an engineered vector comprising any of the nucleic acids described herein. In some embodiments, the vector is a plasmid, a minicircle, a CELiD, an adeno-associated virus (AAV) derived virion, a lentivirus, or an adenovirus

[0011] In some aspects, the present disclosure provides for a cell comprising any of the vectors described herein or any of the nucleic acids described herein. In some embodiments, the cell is a bacterial, archaeal, eukaryotic, fungal, plant, mammalian, or human cell.

[0012] In some aspects, the present disclosure provides for a method of manufacturing an endonuclease, comprising cultivating any of the cells described herein.

[0013] In some aspects, the present disclosure provides for a method for binding, cleaving, marking, or modifying a double-stranded deoxyribonucleic acid polynucleotide, comprising: contacting the double-stranded deoxyribonucleic acid polynucleotide with a class 2, type II Cas endonuclease in complex with an engineered guide nucleic acid structure configured to bind to the endonuclease and the double-stranded deoxyribonucleic acid polynucleotide; wherein the double-stranded deoxyribonucleic acid polynucleotide comprises a protospacer adjacent motif (PAM); and wherein the PAM comprises a sequence according to any one of SEQ ID NOs: 550-567. In some embodiments, the endonuclease further comprises a PI domain comprising a sequence having at least about 80%, at least about 85%, at least about 86%, at least about 87%, at least about 88%, at least about 89%, at least about 90%, at least about 91%, at least about 92%, at least about 93%, at least about 94%, at least about 95%, at least about 96%, at least about 97%, at least about 98%, or at least about 99% sequence identity to any one of SEQ ID NOs: 1277-1641 or 1683, or a variant thereof, or wherein the endonuclease further comprises a PI domain having at least about 80%, at least about 85%, at least about 86%, at least about 87%, at least about 88%, at least about 89%, at least about 90%, at least about 91%, at least about 92%, at least about 93%, at least about 94%, at least about 95%, at least about 96%, at least about 97%, at least about 98%, or at least about 99% sequence identity to a PI domain of any one of SEQ ID NOs: 1-549 or 602-1276. In some embodiments, the endonuclease further comprises a PI domain comprising a sequence having at least about 80%, at least about 85%, at least about 86%, at least about 87%, at least about 88%, at least about 89%, at least about 90%, at least about 91%, at least about 92%, at least about 93%, at least about 94%, at least about 95%, at least about 96%, at least about 97%, at least about 98%, or at least about 99% sequence identity to any one of SEQ ID NOs: 1, 217, 258, 259, 284, 296, 297, 306, 357, 403, 404, 405, 463, 464, 465, 356, or 484, or a variant thereof. In some embodiments, the endonuclease further comprises a PI domain comprising a sequence having at least about 80%, at least about 85%, at least about 86%, at least about 87%, at least about 88%, at least about 89%, at least about 90%, at least about 91%, at least about 92%, at least about 93%, at least about 94%, at least about 95%, at least about 96%, at least about 97%, at least about 98%, or at least about 99% sequence identity to any one of SEQ ID NOs: 259, 296, or 484, or a variant thereof. In some embodiments, the endonuclease further comprises a RuvC domain. In some embodiments, the RuvC domain has at least about 80%, at least about 85%, at least about 86%, at least about 87%, at least about 88%, at least about 89%, at least about 90%, at least about 91%, at least about 92%, at least about 93%, at least about 94%, at least about 95%, at least about 96%, at least about 97%, at least about 98%, or at least about 99% sequence identity to a RuvC domain of any one of SEQ ID NOs: 1, 217, 258, 259, 284, 296, 297, 306, 357, 403, 404, 405, 463, 464, 465, 356, or 484, or a variant thereof. In some embodiments, the RuvC domain has at least about 80%, at least about 85%, at least about 86%, at least about 87%, at least about 88%, at least about 89%, at least about 90%, at least about 91%, at least about 92%, at least about 93%, at least about 94%, at least about 95%, at least about 96%, at least about 97%, at least about 98%, or at least about 99% sequence identity to a RuvC domain of any one of SEQ ID NOs: 259, 296, or 484, or a variant thereof. In some embodiments, the endonuclease further comprises an HNH domain. In some embodiments, the HNH domain has at least about 80%, at least about 85%, at least about 86%, at least about 87%, at least about 88%, at least about 89%, at least about 90%, at least about 91%, at least about 92%, at least about 93%, at least about 94%, at least about 95%, at least about 96%, at least about 97%, at least about 98%, or at least about 99% sequence identity to an HNH domain of any one of SEQ ID NOs: 1, 217, 258, 259, 284, 296, 297, 306, 357, 403, 404, 405, 463, 464, 465, 356, or 484, or a variant thereof. In some embodiments, the HNH domain has at least about 80%, at least about 85%, at least about 86%, at least about 87%, at least about 88%, at least about 89%, at least about 90%, at least about 91%, at least about 92%, at least about 93%, at least about 94%, at least about 95%, at least about 96%, at least about 97%, at least about 98%, or at least about 99% sequence identity to an HNH domain of any one of SEQ ID NOs: 259, 296, or 484, or a variant thereof. In some embodiments, the endonuclease comprises any one of SEQ ID NOs: 1, 217, 258, 259, 284, 296, 297, 306, 357, 403, 404, 405, 463, 464, 465, 356, or 484, or a variant thereof having at least 55%, at least about 80%, at least about 85%, at least about 86%, at least about 87%, at least about 88%, at least about 89%, at least about 90%, at least about 91%, at least about 92%, at least about 93%, at least about 94%, at least about 95%, at least about 96%, at least about 97%, at least about 98%, or at least about 99% sequence identity thereto. In some embodiments, the engineered guide nucleic acid structure comprises a tracr sequence having at least about 80%, at least about 85%, at least about 86%, at least about 87%, at least about 88%, at least about 89%, at least about 90%, at least about 91%, at least about 92%, at least about 93%, at least about 94%, at least about 95%, at least about 96%, at least about 97%, at least about 98%, or at least about 99% sequence identity to any one of SEQ ID NOs: 1645-1662 or wherein the engineered guide nucleic acid structure comprises a sequence having at least about 80%, at least about 85%, at least about 86%, at least about 87%, at least about 88%, at least about 89%, at least about 90%, at least about 91%, at least about 92%, at least about 93%, at least about 94%, at least about 95%, at least about 96%, at least about 97%, at least about 98%, or at least about 99% sequence identity to non- degenerate nucleotides of any one of SEQ ID NOs: 568-585 or 1643-1644. In some embodiments, the engineered guide nucleic acid structure comprises a tracr sequence having at least about 80%, at least about 85%, at least about 86%, at least about 87%, at least about 88%, at least about 89%, at least about 90%, at least about 91%, at least about 92%, at least about 93%, at least about 94%, at least about 95%, at least about 96%, at least about 97%, at least about 98%, or at least about 99% sequence identity to any one of SEQ ID NOs: 1648, 1650, or 1661 or wherein the engineered guide nucleic acid structure comprises a sequence having at least about 80%, at least about 85%, at least about 86%, at least about 87%, at least about 88%, at least about 89%, at least about 90%, at least about 91%, at least about 92%, at least about 93%, at least about 94%, at least about 95%, at least about 96%, at least about 97%, at least about 98%, or at least about 99% sequence identity to non-degenerate nucleotides of any one of SEQ ID NOs: 571, 573, or 584. In some embodiments, the engineered guide nucleic acid structure is configured to form a complex with the endonuclease and comprises (i) a targeting nucleic acid sequence configured to hybridize to a target deoxyribonucleic acid sequence; and (ii) a tracr ribonucleic acid sequence configured to bind to the endonuclease. In some embodiments, the targeting nucleic acid sequence is complementary to a bacterial, archaeal, eukaryotic, fungal, plant, mammalian, or human genomic sequence. In some embodiments, the targeting nucleic acid sequence is 15-24 nucleotides in length.

[0014] In some aspects, the present disclosure provides for a method of editing an AAVS1 locus in a cell, comprising contacting to the cell (a) an RNA-guided endonuclease; and (b) an engineered guide nucleic acid structure, wherein the engineered guide nucleic acid structure is configured to form a complex with the endonuclease and the engineered guide nucleic acid structure comprises a spacer sequence configured to hybridize to a region of the AAVS1 locus, wherein the engineered guide nucleic acid structure comprises a targeting sequence having at least about 80%, at least about 85%, at least about 86%, at least about 87%, at least about 88%, at least about 89%, at least about 90%, at least about 91%, at least about 92%, at least about 93%, at least about 94%, at least about 95%, at least about 96%, at least about 97%, at least about 98%, or at least about 99% sequence identity to at least 18 consecutive nucleotides of any one of SEQ ID NOs: 1665-1666 or a reverse complement thereof. In some embodiments, the engineered guide nucleic acid structure has at least about 80%, at least about 85%, at least about 86%, at least about 87%, at least about 88%, at least about 89%, at least about 90%, at least about 91%, at least about 92%, at least about 93%, at least about 94%, at least about 95%, at least about 96%, at least about 97%, at least about 98%, or at least about 99% sequence identity to any one of SEQ ID NO: 1663 or 1664. In some embodiments, the engineered guide nucleic acid structure is MG71-2-AAVS1-sgRNA-C3 or MG71-2-AAVS1-sgRNA-E2.

[0015] In some aspects, the present disclosure provides for a method of editing a TRAC locus in a cell, comprising contacting to the cell (a) an RNA-guided endonuclease; and (b) an engineered guide nucleic acid structure, wherein the engineered guide nucleic acid structure is configured to form a complex with the endonuclease and the engineered guide nucleic acid structure comprises a spacer sequence configured to hybridize to a region of the TRAC locus, wherein the engineered guide nucleic acid structure comprises a targeting sequence having at least about 80%, at least about 85%, at least about 86%, at least about 87%, at least about 88%, at least about 89%, at least about 90%, at least about 91%, at least about 92%, at least about 93%, at least about 94%, at least about 95%, at least about 96%, at least about 97%, at least about 98%, or at least about 99% sequence identity to at least 18 consecutive nucleotides of any one of SEQ ID NOs: 1668 or 1676-1682, or a reverse complement thereof. In some embodiments, the engineered guide nucleic acid structure has at least about 80%, at least about 85%, at least about 86%, at least about 87%, at least about 88%, at least about 89%, at least about 90%, at least about 91%, at least about 92%, at least about 93%, at least about 94%, at least about 95%, at least about 96%, at least about 97%, at least about 98%, or at least about 99% sequence identity to any one of SEQ ID NOs: 1667 or 1669-1675. In some embodiments, the engineered guide nucleic acid structure is MG73-1-TRAC-sgRNA-G3, MG89-2-TRAC-sgRNA-F1, MG89-2-TRAC-sgRNA-G5, MG89-2-TRAC-sgRNA-E5, MG89-2-TRAC-sgRNA-F5, MG89-2-TRAC-sgRNA-G1, MG89-2-TRAC-sgRNA-E1, MG89-2-TRAC-sgRNA-B1. In some embodiments, the engineered guide nucleic acid structure is configured to form a complex with the endonuclease and comprises (i) a targeting nucleic acid sequence configured to hybridize to a target deoxyribonucleic acid sequence; and (ii) a tracr ribonucleic acid sequence configured to bind to the endonuclease. In some embodiments, the targeting nucleic acid sequence is 15-24 nucleotides in length. In some embodiments, the engineered guide nucleic acid structure comprises a tracr sequence having at least about 80%, at least about 85%, at least about 86%, at least about 87%, at least about 88%, at least about 89%, at least about 90%, at least about 91%, at least about 92%, at least about 93%, at least about 94%, at least about 95%, at least about 96%, at least about 97%, at least about 98%, or at least about 99% sequence identity to any one of SEQ ID NOs: 1645-1662 or wherein the engineered guide nucleic acid structure comprises a sequence having at least 80% identity to non- degenerate nucleotides of any one of SEQ ID NOs: 568-585 or 1643-1644. In some embodiments, the engineered guide nucleic acid structure comprises a tracr sequence having at least about 80%, at least about 85%, at least about 86%, at least about 87%, at least about 88%, at least about 89%, at least about 90%, at least about 91%, at least about 92%, at least about 93%, at least about 94%, at least about 95%, at least about 96%, at least about 97%, at least about 98%, or at least about 99% sequence identity to any one of SEQ ID NOs: 1648, 1650, or 1661 or wherein the engineered guide nucleic acid structure comprises a sequence having at least 80% identity to non-degenerate nucleotides of any one of SEQ ID NOs: 571, 573, or 584. In some embodiments, the RNA guided endonuclease is a class 2, type II Cas endonuclease. In some embodiments, the endonuclease is configured to have selectivity for a PAM sequence comprising any one of SEQ ID NOs: 550-567. In some embodiments, the endonuclease further comprises a PI domain comprising a sequence having at least about 80%, at least about 85%, at least about 86%, at least about 87%, at least about 88%, at least about 89%, at least about 90%, at least about 91%, at least about 92%, at least about 93%, at least about 94%, at least about 95%, at least about 96%, at least about 97%, at least about 98%, or at least about 99% sequence identity to any one of SEQ ID NOs: 1277-1641 or 1683, or a variant thereof, or wherein the endonuclease further comprises a PI domain having at least about 80%, at least about 85%, at least about 86%, at least about 87%, at least about 88%, at least about 89%, at least about 90%, at least about 91%, at least about 92%, at least about 93%, at least about 94%, at least about 95%, at least about 96%, at least about 97%, at least about 98%, or at least about 99% sequence identity to a PI domain of any one of SEQ ID NOs: 1-549 or 602-1276. In some embodiments, the endonuclease further comprises a PI domain comprising a sequence having at least about 80%, at least about 85%, at least about 86%, at least about 87%, at least about 88%, at least about 89%, at least about 90%, at least about 91%, at least about 92%, at least about 93%, at least about 94%, at least about 95%, at least about 96%, at least about 97%, at least about 98%, or at least about 99% sequence identity to any one of SEQ ID NOs: 1, 217, 258, 259, 284, 296, 297, 306, 357, 403, 404, 405, 463, 464, 465, 356, or 484, or a variant thereof. In some embodiments, the endonuclease further comprises a PI domain comprising a sequence having at least about 80%, at least about 85%, at least about 86%, at least about 87%, at least about 88%, at least about 89%, at least about 90%, at least about 91%, at least about 92%, at least about 93%, at least about 94%, at least about 95%, at least about 96%, at least about 97%, at least about 98%, or at least about 99% sequence identity to any one of SEQ ID NOs: 259, 296, or 484, or a variant thereof. In some embodiments, the endonuclease comprises any one of SEQ ID NOs: 1, 217, 258, 259, 284, 296, 297, 306, 357, 403, 404, 405, 463, 464, 465, 356, or 484, or a variant thereof having at least 55% identity, at least about 80%, at least about 85%, at least about 86%, at least about 87%, at least about 88%, at least about 89%, at least about 90%, at least about 91%, at least about 92%, at least about 93%, at least about 94%, at least about 95%, at least about 96%, at least about 97%, at least about 98%, or at least about 99% sequence identity thereto.

[0016] Additional aspects and advantages of the present disclosure will become readily apparent to those skilled in this art from the following detailed description, wherein only illustrative embodiments of the present disclosure are shown and described. As will be realized, the present disclosure is capable of other and different embodiments, and its several details are capable of modifications in various obvious respects, all without departing from the disclosure. Accordingly, the drawings and description are to be regarded as illustrative in nature, and not as restrictive.

### INCORPORATION BY REFERENCE

[0017] All publications, patents, and patent applications mentioned in this specification are herein incorporated by reference to the same extent as if each individual publication, patent, or patent application was specifically and individually indicated to be incorporated by reference.

### BRIEF DESCRIPTION OF THE DRAWINGS

[0018] The novel features of the invention are set forth with particularity in the appended claims. A better understanding of the features and advantages of the present invention will be obtained by reference to the following detailed description that sets forth illustrative embodiments, in which the principles of the invention are utilized, and the accompanying drawings (also “Figure” and “FIG.” herein), of which:

[0019] FIG. 1 depicts typical organizations of CRISPR/Cas loci of different classes and types.

[0020] FIG. 2 depicts the architecture of a natural Class II/Type II crRNA/tracrRNA pair, compared to a hybrid sgRNA wherein both are joined.

[0021] FIG. 3A, FIG. 3B, FIG. 3C, FIG. 3D, and FIG. 3E depict seqLogo representations of PAM sequences derived via NGS as described herein (e.g., as described in Example 3).

[0022] FIG. 4 depicts the gene editing outcomes at the DNA level for TRAC and AAVS1 in K562 cells in Example 7.

### BRIEF DESCRIPTION OF THE SEQUENCE LISTING

[0023] The Sequence Listing filed herewith provides exemplary polynucleotide and polypeptide sequences for use in methods, compositions, and systems according to the disclosure. Below are exemplary descriptions of sequences therein.

### MG44

[0024] SEQ ID NOs: 1-216 and 602-938 show the full-length peptide sequences of MG44 nucleases.

[0025] SEQ ID NO: 550 shows a PAM sequence compatible with an MG44 nuclease.

[0026] SEQ ID NO: 568 shows a nucleotide sequences of sgRNA engineered to function with an MG44 nuclease, where Ns denote nucleotides of a targeting sequence.

[0027] SEQ ID NOs: 1277-1419 show the peptide sequences of PAM-interacting domains of MG44 nucleases.

[0028] SEQ ID NO: 1645 shows the nucleotide sequence of an MG44 tracrRNA derived from the same loci as MG44 nucleases above.

### MG46

[0029] SEQ ID NOs: 217-257 and 939-1104 show the full-length peptide sequences of MG46 nucleases.

[0030] SEQ ID NO: 551 shows a PAM sequence compatible with an MG46 nuclease.

[0031] SEQ ID NO: 569 shows a nucleotide sequences of sgRNA engineered to function with an MG46 nuclease, where Ns denote nucleotides of a targeting sequence.

[0032] SEQ ID NOs: 1420-1497 show the peptide sequences of PAM-interacting domains of MG46 nucleases.

[0033] SEQ ID NO: 1646 shows the nucleotide sequence of an MG46 tracrRNA derived from the same loci as MG46 nucleases above.

### MG71

[0034] SEQ ID NOs: 258-283 and 1105 show the full-length peptide sequences of MG71 nucleases.

[0035] SEQ ID NOs: 552-553 shows PAM sequences compatible with MG71 nucleases.

[0036] SEQ ID NOs: 570-571 show nucleotide sequences of sgRNA engineered to function with an MG71 nucleases, where Ns denote nucleotides of a targeting sequence.

[0037] SEQ ID NOs: 1498-1499 show the peptide sequences of PAM-interacting domains of MG71 nucleases.

[0038] SEQ ID NOs: 1643-1644 show nucleotide sequences of sgRNAs engineered to function with an MG71 nuclease.

[0039] SEQ ID NOs: 1647-1648 show nucleotide sequences of MG71 tracrRNAs derived from the same loci as MG71 nucleases above.

### MG72

[0040] SEQ ID NOs: 284-295 and 1106-1115 show the full-length peptide sequences of MG72 nucleases.

[0041] SEQ ID NO: 554 shows a PAM sequence compatible with an MG72 nuclease.

[0042] SEQ ID NO: 572 shows a nucleotide sequences of sgRNA engineered to function with an MG72 nuclease, where Ns denote nucleotides of a targeting sequence.

[0043] SEQ ID NO: 1649 shows the nucleotide sequence of an MG72 tracrRNA derived from the same loci as MG72 nucleases above.

### MG73

[0044] SEQ ID NOs: 296-305 and 1116-1118 show the full-length peptide sequences of MG73 nucleases.

[0045] SEQ ID NO: 555 shows a PAM sequence compatible with an MG73 nuclease.

[0046] SEQ ID NOs: 573-574 show nucleotide sequences of sgRNA engineered to function with an MG73 nucleases, where Ns denote nucleotides of a targeting sequence.

[0047] SEQ ID NOs: 1500-1505 show the peptide sequences of PAM-interacting domains of MG73 nucleases.

[0048] SEQ ID NOs: 1650-1651 show nucleotide sequences of MG73 tracrRNAs derived from the same loci as MG73 nucleases above.

### MG74

[0049] SEQ ID NOs: 306-355 and 1119-1160 show the full-length peptide sequences of MG74 nucleases. SEQ ID NO: 556 shows a PAM sequence compatible with an MG74 nuclease.

[0050] SEQ ID NO: 575 shows a nucleotide sequences of sgRNA engineered to function with an MG74 nuclease, where Ns denote nucleotides of a targeting sequence.

[0051] SEQ ID NOs: 1506-1519 show the peptide sequences of PAM-interacting domains of MG74 nucleases.

[0052] SEQ ID NO: 1652 shows the nucleotide sequence of an MG74 tracrRNA derived from the same loci as MG74 nucleases above.

### MG86

[0053] SEQ ID NOs: 356-402 and 1161-1206 show the full-length peptide sequences of MG86 nucleases.

[0054] SEQ ID NOs: 557-559 shows PAM sequences compatible with MG86 nucleases.

[0055] SEQ ID NOs: 576-577 show nucleotide sequences of sgRNA engineered to function with an MG86 nucleases, where Ns denote nucleotides of a targeting sequence.

[0056] SEQ ID NOs: 1520-1578 show the peptide sequences of PAM-interacting domains of MG86 nucleases.

[0057] SEQ ID NO: 1642 shows the nucleotide sequence of a single guide PAM of an MG86 nuclease.

[0058] SEQ ID NOs: 1653-1654 show nucleotide sequences of MG86 tracrRNAs derived from the same loci as MG86 nucleases above.

### MG87

[0059] SEQ ID NOs: 403-462 and 1207-1247 show the full-length peptide sequences of MG87 nucleases.

[0060] SEQ ID NOs: 560-562 shows PAM sequences compatible with MG87 nucleases.

[0061] SEQ ID NOs: 578-580 show nucleotide sequences of sgRNA engineered to function with an MG87 nucleases, where Ns denote nucleotides of a targeting sequence.

[0062] SEQ ID NOs: 1579-1615 show the peptide sequences of PAM-interacting domains of MG87 nucleases.

[0063] SEQ ID NOs: 1655-1657 show nucleotide sequences of MG87 tracrRNAs derived from the same loci as MG87 nucleases above.

### MG88

[0064] SEQ ID NOs: 463-482 and 1248-1258 show the full-length peptide sequences of MG88 nucleases.

[0065] SEQ ID NOs: 563-565 shows PAM sequences compatible with MG88 nucleases.

[0066] SEQ ID NOs: 581-583 show nucleotide sequences of sgRNA engineered to function with an MG88 nucleases, where Ns denote nucleotides of a targeting sequence.

[0067] SEQ ID NOs: 1616-1628 show the peptide sequences of PAM-interacting domains of MG88 nucleases.

[0068] SEQ ID NOs: 1658-1660 show nucleotide sequences of MG88 tracrRNAs derived from the same loci as MG88 nucleases above.

### MG89

[0069] SEQ ID NOs: 483-549 and 1259-1276 show the full-length peptide sequences of MG89 nucleases.

[0070] SEQ ID NOs: 566-567 shows PAM sequences compatible with MG89 nucleases.

[0071] SEQ ID NOs: 584-585 show nucleotide sequences of sgRNA engineered to function with an MG89 nucleases, where Ns denote nucleotides of a targeting sequence.

[0072] SEQ ID NOs: 1629-1641 show the peptide sequences of PAM-interacting domains of MG89 nucleases.

[0073] SEQ ID NOs: 1661-1662 show nucleotide sequences of MG88 tracrRNAs derived from the same loci as MG88 nucleases above.

### MG71-2 AAVS1 Targeting

[0074] SEQ ID NOs: 1663-1664 show the nucleotide sequences of sgRNAs engineered to function with an MG71-2 nuclease in order to target AAVS1.

[0075] SEQ ID NOs: 1665-1666 show the DNA sequences of AAVS1 target sites.

### MG73-1 TRAC Targeting

[0076] SEQ ID NO: 1667 shows the nucleotide sequence of an sgRNA engineered to function with an MG73-1 nuclease in order to target TRAC.

[0077] SEQ ID NO: 1668 shows the DNA sequence of a TRAC target site.

### MG89-2 TRAC Targeting

[0078] SEQ ID NOs: 1669-1675 show the nucleotide sequences of sgRNAs engineered to function with an MG89-2 nuclease in order to target TRAC. SEQ ID NOs: 1676-1682 show the DNA sequences of TRAC target sites.

### DETAILED DESCRIPTION

[0079] While various embodiments of the invention have been shown and described herein, it will be obvious to those skilled in the art that such embodiments are provided by way of example only. Numerous variations, changes, and substitutions may occur to those skilled in the art without departing from the invention. It should be understood that various alternatives to the embodiments of the invention described herein may be employed.

[0080] The practice of some methods disclosed herein employ, unless otherwise indicated, techniques of immunology, biochemistry, chemistry, molecular biology, microbiology, cell biology, genomics, and recombinant DNA. See for example Sambrook and Green, Molecular Cloning: A Laboratory Manual, 4th Edition (2012); the series Current Protocols in Molecular Biology (F. M. Ausubel, et al. eds.); the series Methods In Enzymology (Academic Press, Inc.), PCR 2: A Practical Approach (M. J. MacPherson, B. D. Hames and G. R. Taylor eds. (1995)), Harlow and Lane, eds. (1988) Antibodies, A Laboratory Manual, and Culture of Animal Cells: A Manual of Basic Technique and Specialized Applications, 6th Edition (R. I. Freshney, ed. (2010)) (which is entirely incorporated by reference herein).

[0081] As used herein, the singular forms “a”, “an” and “the” are intended to include the plural forms as well, unless the context clearly indicates otherwise. Furthermore, to the extent that the terms “including”, “includes”, “having”, “has”, “with”, or variants thereof are used in either the detailed description and/or the claims, such terms are intended to be inclusive in a manner similar to the term “comprising”.

[0082] The term “about” or “approximately” means within an acceptable error range for the particular value as determined by one of ordinary skill in the art, which will depend in part on how the value is measured or determined, i.e., the limitations of the measurement system. For example, “about” can mean within one or more than one standard deviation, per the practice in the art. Alternatively, “about” can mean a range of up to 20%, up to 15%, up to 10%, up to 5%, or up to 1% of a given value.

[0083] As used herein, a “cell” generally refers to a biological cell. A cell may be the basic structural, functional and/or biological unit of a living organism. A cell may originate from any organism having one or more cells. Some non-limiting examples include: a prokaryotic cell, eukaryotic cell, a bacterial cell, an archaeal cell, a cell of a single-cell eukaryotic organism, a protozoa cell, a cell from a plant (e.g., cells from plant crops, fruits, vegetables, grains, soy bean, corn, maize, wheat, seeds, tomatoes, rice, cassava, sugarcane, pumpkin, hay, potatoes, cotton, cannabis, tobacco, flowering plants, conifers, gymnosperms, ferns, clubmosses, hornworts, liverworts, mosses), an algal cell, (e.g.,, Botryococcus braunii, Chlamydomonas reinhardtii, Nannochloropsis gaditana, Chlorella pyrenoidosa, Sargassum patens C. Agardh, and the like), seaweeds (e.g., kelp), a fungal cell (e.g.,, a yeast cell, a cell from a mushroom), an animal cell, a cell from an invertebrate animal (e.g., fruit fly, cnidarian, echinoderm, nematode, etc.), a cell from a vertebrate animal (e.g., fish, amphibian, reptile, bird, mammal), a cell from a mammal (e.g., a pig, a cow, a goat, a sheep, a rodent, a rat, a mouse, a non-human primate, a human, etc.), and etcetera. Sometimes a cell is not originating from a natural organism (e.g., a cell can be a synthetically made, sometimes termed an artificial cell).

[0084] The term “nucleotide,” as used herein, generally refers to a base-sugar-phosphate combination. A nucleotide may comprise a synthetic nucleotide. A nucleotide may comprise a synthetic nucleotide analog. Nucleotides may be monomeric units of a nucleic acid sequence (e.g., deoxyribonucleic acid (DNA) and ribonucleic acid (RNA)). The term nucleotide may include ribonucleoside triphosphates adenosine triphosphate (ATP), uridine triphosphate (UTP), cytosine triphosphate (CTP), guanosine triphosphate (GTP) and deoxyribonucleoside triphosphates such as dATP, dCTP, dITP, dUTP, dGTP, dTTP, or derivatives thereof. Such derivatives may include, for example, [αS]dATP, 7-deaza-dGTP and 7-deaza-dATP, and nucleotide derivatives that confer nuclease resistance on the nucleic acid molecule containing them. The term nucleotide as used herein may refer to dideoxyribonucleoside triphosphates (ddNTPs) and their derivatives. Illustrative examples of dideoxyribonucleoside triphosphates may include, but are not limited to, ddATP, ddCTP, ddGTP, ddITP, and ddTTP. A nucleotide may be unlabeled or detectably labeled, such as using moieties comprising optically detectable moieties (e.g., fluorophores). Labeling may also be carried out with quantum dots. Detectable labels may include, for example, radioactive isotopes, fluorescent labels, chemiluminescent labels, bioluminescent labels, and enzyme labels. Fluorescent labels of nucleotides may include but are not limited fluorescein, 5-carboxyfluorescein (FAM), 2′7′-dimethoxy-4′5-dichloro-6-carboxyfluorescein (JOE), rhodamine, 6-carboxyrhodamine (R6G), N,N,N′,N′-tetramethyl-6-carboxyrhodamine (TAMRA), 6-carboxy-X-rhodamine (ROX), 4-(4′dimethylaminophenylazo) benzoic acid (DABCYL), Cascade Blue, Oregon Green, Texas Red, Cyanine and 5-(2′-aminoethyl)aminonaphthalene-1-sulfonic acid (EDANS). Specific examples of fluorescently labeled nucleotides can include [R6G]dUTP, [TAMRA]dUTP, [R110]dCTP, [R6G]dCTP, [TAMRA]dCTP, [JOE]ddATP, [R6G]ddATP, [FAM]ddCTP, [R110]ddCTP, [TAMRA]ddGTP, [ROX]ddTTP, [dR6G]ddATP, [dR110]ddCTP, [dTAMRA]ddGTP, and [dROX]ddTTP available from Perkin Elmer, Foster City, Calif; FluoroLink DeoxyNucleotides, FluoroLink Cy3-dCTP, FluoroLink Cy5-dCTP, FluoroLink Fluor X-dCTP, FluoroLink Cy3-dUTP, and FluoroLink Cy5-dUTP available from Amersham, Arlington Heights, Ill.; Fluorescein-15-dATP, Fluorescein-12-dUTP, Tetramethyl-rodamine-6-dUTP, IR770-9-dATP, Fluorescein-12-ddUTP, Fluorescein-12-UTP, and Fluorescein-15-2′-dATP available from Boehringer Mannheim, Indianapolis, Ind.; and Chromosome Labeled Nucleotides, BODIPY-FL-14-UTP, BODIPY-FL-4-UTP, BODIPY-TMR-14-UTP, BODIPY-TMR-14-dUTP, BODIPY-TR-14-UTP, BODIPY-TR-14-dUTP, Cascade Blue-7-UTP, Cascade Blue-7-dUTP, fluorescein-12-UTP, fluorescein-12-dUTP, Oregon Green 488-5-dUTP, Rhodamine Green-5-UTP, Rhodamine Green-5-dUTP, tetramethylrhodamine-6-UTP, tetramethylrhodamine-6-dUTP, Texas Red-5-UTP, Texas Red-5-dUTP, and Texas Red-12-dUTP available from Molecular Probes, Eugene, Oreg. Nucleotides can also be labeled or marked by chemical modification. A chemically-modified single nucleotide can be biotin-dNTP. Some non-limiting examples of biotinylated dNTPs can include, biotin-dATP (e.g., bio-N6-ddATP, biotin-14-dATP), biotin-dCTP (e.g., biotin-11-dCTP, biotin-14-dCTP), and biotin-dUTP (e.g., biotin-11-dUTP, biotin-16-dUTP, biotin-20-dUTP).

[0085] The terms “polynucleotide,” “oligonucleotide,” and “nucleic acid” are used interchangeably to generally refer to a polymeric form of nucleotides of any length, either deoxyribonucleotides or ribonucleotides, or analogs thereof, either in single-, double-, or multi-stranded form. A polynucleotide may be exogenous or endogenous to a cell. A polynucleotide may exist in a cell-free environment. A polynucleotide may be a gene or fragment thereof. A polynucleotide may be DNA. A polynucleotide may be RNA. A polynucleotide may have any three-dimensional structure and may perform any function. A polynucleotide may comprise one or more analogs (e.g., altered backbone, sugar, or nucleobase). If present, modifications to the nucleotide structure may be imparted before or after assembly of the polymer. Some non-limiting examples of analogs include: 5-bromouracil, peptide nucleic acid, xeno nucleic acid, morpholinos, locked nucleic acids, glycol nucleic acids, threose nucleic acids, dideoxynucleotides, cordycepin, 7-deaza-GTP, fluorophores (e.g., rhodamine or fluorescein linked to the sugar), thiol containing nucleotides, biotin linked nucleotides, fluorescent base analogs, CpG islands, methyl-7-guanosine, methylated nucleotides, inosine, thiouridine, pseudourdine, dihydrouridine, queuosine, and wyosine. Non-limiting examples of polynucleotides include coding or non-coding regions of a gene or gene fragment, loci (locus) defined from linkage analysis, exons, introns, messenger RNA (mRNA), transfer RNA (tRNA), ribosomal RNA (rRNA), short interfering RNA (siRNA), short-hairpin RNA (shRNA), micro-RNA (miRNA), ribozymes, cDNA, recombinant polynucleotides, branched polynucleotides, plasmids, vectors, isolated DNA of any sequence, isolated RNA of any sequence, cell-free polynucleotides including cell-free DNA (cfDNA) and cell-free RNA (cfRNA), nucleic acid probes, and primers. The sequence of nucleotides may be interrupted by non-nucleotide components.

[0086] The terms “transfection” or “transfected” generally refer to introduction of a nucleic acid into a cell by non-viral or viral-based methods. The nucleic acid molecules may be gene sequences encoding complete proteins or functional portions thereof. See, e.g., Sambrook et al., 1989, Molecular Cloning: A Laboratory Manual, 18.1-18.88.

[0087] The terms “peptide,” “polypeptide,” and “protein” are used interchangeably herein to generally refer to a polymer of at least two amino acid residues joined by peptide bond(s). This term does not connote a specific length of polymer, nor is it intended to imply or distinguish whether the peptide is produced using recombinant techniques, chemical or enzymatic synthesis, or is naturally occurring. The terms apply to naturally occurring amino acid polymers as well as amino acid polymers comprising at least one modified amino acid. In some cases, the polymer may be interrupted by non-amino acids. The terms include amino acid chains of any length, including full length proteins, and proteins with or without secondary and/or tertiary structure (e.g., domains). The terms also encompass an amino acid polymer that has been modified, for example, by disulfide bond formation, glycosylation, lipidation, acetylation, phosphorylation, oxidation, and any other manipulation such as conjugation with a labeling component. The terms “amino acid” and “amino acids,” as used herein, generally refer to natural and non-natural amino acids, including, but not limited to, modified amino acids and amino acid analogues. Modified amino acids may include natural amino acids and non-natural amino acids, which have been chemically modified to include a group or a chemical moiety not naturally present on the amino acid. Amino acid analogues may refer to amino acid derivatives. The term “amino acid” includes both D-amino acids and L-amino acids.

[0088] As used herein, the “non-native” can generally refer to a nucleic acid or polypeptide sequence that is not found in a native nucleic acid or protein. Non-native may refer to affinity tags. Non-native may refer to fusions. Non-native may refer to a naturally occurring nucleic acid or polypeptide sequence that comprises mutations, insertions and/or deletions. A non-native sequence may exhibit and/or encode for an activity (e.g., enzymatic activity, methyltransferase activity, acetyltransferase activity, kinase activity, ubiquitinating activity, etc.) that may also be exhibited by the nucleic acid and/or polypeptide sequence to which the non-native sequence is fused. A non-native nucleic acid or polypeptide sequence may be linked to a naturally-occurring nucleic acid or polypeptide sequence (or a variant thereof) by genetic engineering to generate a chimeric nucleic acid and/or polypeptide sequence encoding a chimeric nucleic acid and/or polypeptide.

[0089] The term “promoter”, as used herein, generally refers to the regulatory DNA region which controls transcription or expression of a gene and which may be located adjacent to or overlapping a nucleotide or region of nucleotides at which RNA transcription is initiated. A promoter may contain specific DNA sequences which bind protein factors, often referred to as transcription factors, which facilitate binding of RNA polymerase to the DNA leading to gene transcription. A ‘basal promoter’, also referred to as a ‘core promoter’, may generally refer to a promoter that contains all the basic necessary elements to promote transcriptional expression of an operably linked polynucleotide. Eukaryotic basal promoters typically, though not necessarily, contain a TATA-box and/or a CAAT box.

[0090] The term “expression”, as used herein, generally refers to the process by which a nucleic acid sequence or a polynucleotide is transcribed from a DNA template (such as into mRNA or other RNA transcript) and/or the process by which a transcribed mRNA is subsequently translated into peptides, polypeptides, or proteins. Transcripts and encoded polypeptides may be collectively referred to as “gene product.” If the polynucleotide is derived from genomic DNA, expression may include splicing of the mRNA in a eukaryotic cell.

[0091] As used herein, “operably linked”, “operable linkage”, “operatively linked”, or grammatical equivalents thereof generally refer to juxtaposition of genetic elements, e.g., a promoter, an enhancer, a polyadenylation sequence, etc., wherein the elements are in a relationship permitting them to operate in the expected manner For instance, a regulatory element, which may comprise promoter and/or enhancer sequences, is operatively linked to a coding region if the regulatory element helps initiate transcription of the coding sequence. There may be intervening residues between the regulatory element and coding region so long as this functional relationship is maintained.

[0092] A “vector” as used herein, generally refers to a macromolecule or association of macromolecules that comprises or associates with a polynucleotide and which may be used to mediate delivery of the polynucleotide to a cell. Examples of vectors include plasmids, viral vectors, liposomes, and other gene delivery vehicles. The vector generally comprises genetic elements, e.g., regulatory elements, operatively linked to a gene to facilitate expression of the gene in a target.

[0093] As used herein, “an expression cassette” and “a nucleic acid cassette” are used interchangeably generally to refer to a combination of nucleic acid sequences or elements that are expressed together or are operably linked for expression. In some cases, an expression cassette refers to the combination of regulatory elements and a gene or genes to which they are operably linked for expression.

[0094] A “functional fragment” of a DNA or protein sequence generally refers to a fragment that retains a biological activity (either functional or structural) that is substantially similar to a biological activity of the full-length DNA or protein sequence. A biological activity of a DNA sequence may be its ability to influence expression in a manner known to be attributed to the full-length sequence.

[0095] As used herein, an “engineered” object generally indicates that the object has been modified by human intervention. According to non-limiting examples: a nucleic acid may be modified by changing its sequence to a sequence that does not occur in nature; a nucleic acid may be modified by ligating it to a nucleic acid that it does not associate with in nature such that the ligated product possesses a function not present in the original nucleic acid; an engineered nucleic acid may synthesized in vitro with a sequence that does not exist in nature; a protein may be modified by changing its amino acid sequence to a sequence that does not exist in nature; an engineered protein may acquire a new function or property. An “engineered” system comprises at least one engineered component.

[0096] As used herein, “synthetic” and “artificial” are used interchangeably to refer to a protein or a domain thereof that has low sequence identity (e.g., less than 50% sequence identity, less than 25% sequence identity, less than 10% sequence identity, less than 5% sequence identity, less than 1% sequence identity) to a naturally occurring human protein. For example, VPR and VP64 domains are synthetic transactivation domains.

[0097] The term “tracrRNA” or “tracr sequence”, as used herein, can generally refer to a nucleic acid with at least about 5%, 10%, 20%, 30%, 40%, 50%, 60%, 70%, 80%, 90%, 95%, or 100% sequence identity and/or sequence similarity to a wild type exemplary tracrRNA sequence (e.g., a tracrRNA from S. pyogenes S. aureus, etc.). tracrRNA can refer to a nucleic acid with at most about 5%, 10%, 20%, 30%, 40%, 50%, 60%, 70%, 80%, 90%, or 100% sequence identity and/or sequence similarity to a wild type exemplary tracrRNA sequence (e.g., a tracrRNA from S. pyogenes S. aureus, etc). tracrRNA may refer to a modified form of a tracrRNA that can comprise a nucleotide change such as a deletion, insertion, or substitution, variant, mutation, or chimera. A tracrRNA may refer to a nucleic acid that can be at least about 60% identical to a wild type exemplary tracrRNA (e.g., a tracrRNA from S. pyogenes S. aureus, etc) sequence over a stretch of at least 6 contiguous nucleotides. For example, a tracrRNA sequence can be at least about 60% identical, at least about 65% identical, at least about 70% identical, at least about 75% identical, at least about 80% identical, at least about 85% identical, at least about 90% identical, at least about 95% identical, at least about 98% identical, at least about 99% identical, or 100% identical to a wild type exemplary tracrRNA (e.g., a tracrRNA from S. pyogenes S. aureus, etc) sequence over a stretch of at least 6 contiguous nucleotides. Type II tracrRNA sequences can be predicted on a genome sequence by identifying regions with complementarity to part of the repeat sequence in an adjacent CRISPR array.

[0098] As used herein, a “guide nucleic acid” can generally refer to a nucleic acid that may hybridize to another nucleic acid. A guide nucleic acid may be RNA. A guide nucleic acid may be DNA. The guide nucleic acid may be programmed to bind to a sequence of nucleic acid site-specifically. The nucleic acid to be targeted, or the target nucleic acid, may comprise nucleotides. The guide nucleic acid may comprise nucleotides. A portion of the target nucleic acid may be complementary to a portion of the guide nucleic acid. The strand of a double-stranded target polynucleotide that is complementary to and hybridizes with the guide nucleic acid may be called the complementary strand. The strand of the double-stranded target polynucleotide that is complementary to the complementary strand, and therefore may not be complementary to the guide nucleic acid may be called noncomplementary strand. A guide nucleic acid may comprise a polynucleotide chain and can be called a “single guide nucleic acid.” A guide nucleic acid may comprise two polynucleotide chains and may be called a “double guide nucleic acid.” If not otherwise specified, the term “guide nucleic acid” may be inclusive, referring to both single guide nucleic acids and double guide nucleic acids. A guide nucleic acid may comprise a segment that can be referred to as a “nucleic acid-targeting segment” or a “nucleic acid-targeting sequence.” A nucleic acid-targeting segment may comprise a sub-segment that may be referred to as a “protein binding segment” or “protein binding sequence” or “Cas protein binding segment”.

[0099] The term “sequence identity” or “percent identity” in the context of two or more nucleic acids or polypeptide sequences, generally refers to two (e.g., in a pairwise alignment) or more (e.g., in a multiple sequence alignment) sequences that are the same or have a specified percentage of amino acid residues or nucleotides that are the same, when compared and aligned for maximum correspondence over a local or global comparison window, as measured using a sequence comparison algorithm. Suitable sequence comparison algorithms for polypeptide sequences include, e.g., BLASTP using parameters of a wordlength (W) of 3, an expectation (E) of 10, and the BLOSUM62 scoring matrix setting gap costs at existence of 11, extension of 1, and using a conditional compositional score matrix adjustment for polypeptide sequences longer than 30 residues; BLASTP using parameters of a wordlength (W) of 2, an expectation (E) of 1000000, and the PAM30 scoring matrix setting gap costs at 9 to open gaps and 1 to extend gaps for sequences of less than 30 residues (these are the default parameters for BLASTP in the BLAST suite available at https://blast.ncbi.nlm nih.gov); CLUSTALW with parameters of ; the Smith-Waterman homology search algorithm with parameters of a match of 2, a mismatch of -1, and a gap of -1; MUSCLE with default parameters; MAFFT with parameters retree of 2 and maxiterations of 1000; Novafold with default parameters; HMMER hmmalign with default parameters.

[0100] As used herein, the term “RuvC III domain” generally refers to a third discontinuous segment of a RuvC endonuclease domain (the RuvC nuclease domain being comprised of three discontiguous segments, RuvC_I, RuvC_II, and RuvC_III). A RuvC domain or segments thereof can generally be identified by alignment to known domain sequences, structural alignment to proteins with annotated domains, or by comparison to Hidden Markov Models (HMMs) built based on known domain sequences (e.g., Pfam HMM PF18541 for RuvC_III).

[0101] As used herein, the term “HNH domain” generally refers to an endonuclease domain having characteristic histidine and asparagine residues. An HNH domain can generally be identified by alignment to known domain sequences, structural alignment to proteins with annotated domains, or by comparison to Hidden Markov Models (HMMs) built based on known domain sequences (e.g., Pfam HMM PF01844 for domain HNH).

[0102] As used herein, the term “Wedge” (WED) domain generally refers to a domain (e.g. present in a Cas protein) interacting primarily with repeat:anti-repeat duplex of the sgRNA and PAM duplex.

[0103] As used herein, the term “PAM interacting domain” generally refers to a domain interacting with the protospacer-adjacent motif (PAM) external to the seed sequence in a region targeted by a Cas protein. Examples of PAM-interacting domains include, but are not limited to, Topoisomerase-homology (TOPO) domains and C-terminal domains (CTD) present in Cas proteins.

[0104] Included in the current disclosure are variants of any of the enzymes described herein with one or more conservative amino acid substitutions. Such conservative substitutions can be made in the amino acid sequence of a polypeptide without disrupting the three-dimensional structure or function of the polypeptide. Conservative substitutions can be accomplished by substituting amino acids with similar hydrophobicity, polarity, and R chain length for one another. Additionally, or alternatively, by comparing aligned sequences of homologous proteins from different species, conservative substitutions can be identified by locating amino acid residues that have been mutated between species (e.g., non-conserved residues) without altering the basic functions of the encoded proteins. Such conservatively substituted variants may include variants with at least about 20%, at least about 25%, at least about 30%, at least about 35%, at least about 40%, at least about 45%, at least about 50%, at least about 55%, at least about 60%, at least about 65%, at least about 70%, at least about 75%, at least about 80%, at least about 85%, at least about 90%, at least about 91%, at least about 92%, at least about 93%, at least about 94%, at least about 95%, at least about 96%, at least about 97%, at least about 98%, at least about 99% identity to any one of the endonuclease protein sequences described herein (e.g. MG44, MG46, MG71, MG72, MG73, MG74, MG86, MG87, MG88, or MG89 family endonucleases described herein, or any other family nuclease described herein). In some embodiments, such conservatively substituted variants are functional variants. Such functional variants can encompass sequences with substitutions such that the activity of one or more critical active site residues or guide RNA binding residues of the endonuclease are not disrupted. In some embodiments, a functional variant of any of the proteins described herein lacks substitution of at least one of the conserved or functional residues of RuvC or HNH domains of endonucleases described herein. In some embodiments, a functional variant of any of the proteins described herein lacks substitution of all of the conserved or functional residues of the RuvC or HNH domains of endonucleases described herein.

[0105] Conservative substitution tables providing functionally similar amino acids are available from a variety of references (see, for e.g., Creighton, Proteins: Structures and Molecular Properties (W H Freeman & Co.; 2nd edition (December 1993)). The following eight groups each contain amino acids that are conservative substitutions for one another:
[0106] 1) Alanine (A), Glycine (G);
[0107] 2) Aspartic acid (D), Glutamic acid (E);
[0108] 3) Asparagine (N), Glutamine (Q);
[0109] 4) Arginine (R), Lysine (K);
[0110] 5) Isoleucine (I), Leucine (L), Methionine (M), Valine (V);
[0111] 6) Phenylalanine (F), Tyrosine (Y), Tryptophan (W);
[0112] 7) Serine (S), Threonine (T); and
[0113] 8) Cysteine (C), Methionine (M)

### Overview

[0114] The discovery of new Cas enzymes with unique functionality and structure may offer the potential to further disrupt deoxyribonucleic acid (DNA) editing technologies, improving speed, specificity, functionality, and ease of use. Relative to the predicted prevalence of Clustered Regularly Interspaced Short Palindromic Repeats (CRISPR) systems in microbes and the sheer diversity of microbial species, relatively few functionally characterized CRISPR/Cas enzymes exist in the literature. This is partly because a huge number of microbial species may not be readily cultivated in laboratory conditions. Metagenomic sequencing from natural environmental niches that represent large numbers of microbial species may offer the potential to drastically increase the number of new CRISPR/Cas systems known and speed the discovery of new oligonucleotide editing functionalities. A recent example of the fruitfulness of such an approach is demonstrated by the 2016 discovery of CasX/CasY CRISPR systems from metagenomic analysis of natural microbial communities.

[0115] CRISPR/Cas systems are RNA-directed nuclease complexes that have been described to function as an adaptive immune system in microbes. In their natural context, CRISPR/Cas systems occur in CRISPR (clustered regularly interspaced short palindromic repeats) operons or loci, which generally comprise two parts: (i) an array of short repetitive sequences (30-40 bp) separated by equally short spacer sequences, which encode the RNA-based targeting element; and (ii) ORFs encoding the Cas encoding the nuclease polypeptide directed by the RNA-based targeting element alongside accessory proteins/enzymes. Efficient nuclease targeting of a particular target nucleic acid sequence generally requires both (i) complementary hybridization between the first 6-8 nucleic acids of the target (the target seed) and the crRNA guide; and (ii) the presence of a protospacer-adjacent motif (PAM) sequence within a defined vicinity of the target seed (the PAM usually being a sequence not commonly represented within the host genome). Depending on the exact function and organization of the system, CRISPR-Cas systems are commonly organized into 2 classes, 5 types and 16 subtypes based on shared functional characteristics and evolutionary similarity.

[0116] Class I CRISPR-Cas systems have large, multisubunit effector complexes, and comprise Types I, III, and IV.

[0117] Type I CRISPR-Cas systems are considered of moderate complexity in terms of components. In Type I CRISPR-Cas systems, the array of RNA-targeting elements is transcribed as a long precursor crRNA (pre-crRNA) that is processed at repeat elements to liberate short, mature crRNAs that direct the nuclease complex to nucleic acid targets when they are followed by a suitable short consensus sequence called a protospacer-adjacent motif (PAM). This processing occurs via an endoribonuclease subunit (Cas6) of a large endonuclease complex called Cascade, which also comprises a nuclease (Cas3) protein component of the crRNA-directed nuclease complex. Cas I nucleases function primarily as DNA nucleases.

[0118] Type III CRISPR systems may be characterized by the presence of a central nuclease, known as Cas10, alongside a repeat-associated mysterious protein (RAMP) that comprises Csm or Cmr protein subunits. Like in Type I systems, the mature crRNA is processed from a pre-crRNA using a Cas6-like enzyme. Unlike type I and II systems, type III systems appear to target and cleave DNA-RNA duplexes (such as DNA strands being used as templates for an RNA polymerase).

[0119] Type IV CRISPR-Cas systems possess an effector complex that consists of a highly reduced large subunit nuclease (csf1), two genes for RAMP proteins of the Cas5 (csf3) and Cas7 (csf2) groups, and, in some cases, a gene for a predicted small subunit; such systems are commonly found on endogenous plasmids.

[0120] Class II CRISPR-Cas systems generally have single-polypeptide multidomain nuclease effectors, and comprise Types II, V and VI.

[0121] Type II CRISPR-Cas systems are considered the simplest in terms of components. In Type II CRISPR-Cas systems, the processing of the CRISPR array into mature crRNAs does not require the presence of a special endonuclease subunit, but rather a small trans-encoded crRNA (tracrRNA) with a region complementary to the array repeat sequence; the tracrRNA interacts with both its corresponding effector nuclease (e.g. Cas9) and the repeat sequence to form a precursor dsRNA structure, which is cleaved by endogenous RNAse III to generate a mature effector enzyme loaded with both tracrRNA and crRNA. Cas II nucleases are known as DNA nucleases. Type 2 effectors generally exhibit a structure consisting of a RuvC-like endonuclease domain that adopts the RNase H fold with an unrelated HNH nuclease domain inserted within the folds of the RuvC-like nuclease domain The RuvC-like domain is responsible for the cleavage of the target (e.g., crRNA-complementary) DNA strand, while the HNH domain is responsible for cleavage of the displaced DNA strand. Type II effectors also can comprise PAM-interacting or PI domains that comprise TOPO and CTD regions that contribute to recognition of a protospacer adjacent motif (PAM) site in the vicinity of the crRNA-targeted DNA region.

[0122] Type V CRISPR-Cas systems are characterized by a nuclease effector (e.g. Cas12) structure similar to that of Type II effectors, comprising a RuvC-like domain Similar to Type II, most (but not all) Type V CRISPR systems use a tracrRNA to process pre-crRNAs into mature crRNAs; however, unlike Type II systems which requires RNAse III to cleave the pre-crRNA into multiple crRNAs, type V systems are capable of using the effector nuclease itself to cleave pre-crRNAs Like Type-II CRISPR-Cas systems, Type V CRISPR-Cas systems are again known as DNA nucleases. Unlike Type II CRISPR-Cas systems, some Type V enzymes (e.g., Cas12a) appear to have a robust single-stranded nonspecific deoxyribonuclease activity that is activated by the first crRNA directed cleavage of a double-stranded target sequence.

[0123] Type VI CRIPSR-Cas systems have RNA-guided RNA endonucleases. Instead of RuvC-like domains, the single polypeptide effector of Type VI systems (e.g. Cas13) comprises two HEPN ribonuclease domains. Differing from both Type II and V systems, Type VI systems also appear to not need a tracrRNA for processing of pre-crRNA into crRNA. Similar to type V systems, however, some Type VI systems (e.g., C2C2) appear to possess robust single-stranded nonspecific nuclease (ribonuclease) activity activated by the first crRNA directed cleavage of a target RNA.

[0124] Because of their simpler architecture, Class II CRISPR-Cas have been most widely adopted for engineering and development as designer nuclease/genome editing applications.

[0125] One of the early adaptations of such a system for in vitro use can be found in Jinek et al. (Science. 2012 Aug. 17; 337(6096):816-21, which is entirely incorporated herein by reference). The Jinek study first described a system that involved (i) recombinantly-expressed, purified full-length Cas9 (e.g., a Class II, Type II Cas enzyme) isolated from S. pyogenes SF370, (ii) purified mature ˜42 nt crRNA bearing a ˜20 nt 5′ sequence complementary to the target DNA sequence desired to be cleaved followed by a 3′ tracr-binding sequence (the whole crRNA being in vitro transcribed from a synthetic DNA template carrying a T7 promoter sequence); (iii) purified tracrRNA in vitro transcribed from a synthetic DNA template carrying a T7 promoter sequence, and (iv) Mg²⁺. Jinek later described an improved, engineered system wherein the crRNA of (ii) is joined to the 5′ end of (iii) by a linker (e.g., GAAA) to form a single fused synthetic guide RNA (sgRNA) capable of directing Cas9 to a target by itself (compare top and bottom panel of FIG. 2).

[0126] Mali et al. (Science. 2013 Feb. 15; 339(6121): 823-826.), which is entirely incorporated herein by reference, later adapted this system for use in mammalian cells by providing DNA vectors encoding (i) an ORF encoding codon-optimized Cas9 (e.g., a Class II, Type II Cas enzyme) under a suitable mammalian promoter with a C-terminal nuclear localization sequence (e.g., SV40 NLS) and a suitable polyadenylation signal (e.g., TK pA signal); and (ii) an ORF encoding an sgRNA (having a 5′ sequence beginning with G followed by 20 nt of a complementary targeting nucleic acid sequence joined to a 3′ tracr-binding sequence, a linker, and the tracrRNA sequence) under a suitable Polymerase III promoter (e.g., the U6 promoter) .

### MG Enzymes

[0127] In one aspect, the present disclosure provides for an engineered nuclease system comprising (a) an endonuclease. In some cases, the endonuclease is a Cas endonuclease. In some cases, the endonuclease is a Type II, Class II Cas endonuclease. The endonuclease may comprise a RuvC domain or a portion thereof (e.g. a RuvC_I, RuvC_II, or RuvC_III domain) The endonuclease may comprise an HNH domain The endonuclease may comprise a PAM-interacting (PI) domain.

[0128] In some cases, the endonuclease may comprise a variant having at least about 30%, at least about 35%, at least about 40%, at least about 45%, at least about 50%, at least about 55%, at least about 60%, at least about 65%, at least about 70%, at least about 75%, at least about 80%, at least about 85%, at least about 86%, at least about 87%, at least about 88%, at least about 89%, at least about 90%, at least about 91%, at least about 92%, at least about 93%, at least about 94%, at least about 95%, at least about 96%, at least about 97%, at least about 98%, or at least about 99% identity to any one of SEQ ID NOs: 1-549 or 602-1276. In some cases, the endonuclease may be substantially identical to any one of SEQ ID NOs: 1-549 or 602-1276.

[0129] In some embodiments, an endonuclease system according to the present disclosure can comprise any of the components describe in Table 1.

TABLE 1
PAM sequence specificities and related data for MG enzymes

| | Enzyme | tracrRNA | sgRNA | | | 3′ PAM |
|---|---|---|---|---|---|---|
| | protein | SEQ | SEQ | | | SEQ |
| | SEQ ID | ID | ID | PI | | ID |
| Enzyme | NO | NO: | NO: | domain | 3′ PAM | NO: |
| MG44-1 | 1 | 1645 | 568 | 1277 | nnnAACnn | 550 |
| MG46-1 | 217 | 1646 | 569 | 1420 | nnYAAnnn | 551 |
| MG71-1 | 258 | 1647 | 570, | 1498 | nnRMYnn | 552 |
| | | | 1643 | | | |
| MG71-2 | 259 | 1648 | 571 | 1683 | nnnACTnn | 553 |
| MG72-1 | 284 | 1649 | 572 | 1428 | nnWAnCnn | 554 |
| MG73-1 | 296 | 1650 | 573 | 1500 | nnRnTTnn | 555 |
| MG73-2 | 297 | 1651 | 574 | 1501 | nnRnTTnn | 555 |
| MG74-1 | 306 | 1652 | 575 | 1506 | nnnnRMAA | 556 |
| MG86-2 | 357 | 1654 | 577 | 1521 | nRAAR, | 558, 559 |
| | | | | | nYAAAA | |
| MG87-1 | 403 | 1655 | 578 | 1579 | nnnnGTY | 560 |
| MG87-2 | 404 | 1656 | 579 | 1580 | nnRnG | 561 |
| MG87-3 | 405 | 1657 | 580 | 1581 | nnrtRTY | 562 |
| MG88-1 | 463 | 1658 | 581 | 1616 | nRRRa | 563 |
| MG88-2 | 464 | 1659 | 582 | 1626 | nRRwww | 564 |
| MG88-3 | 465 | 1660 | 583 | 1617 | nRRRnY | 565 |
| MG86-1 | 356 | 1653 | 576 | 1520 | nyAAAr | 557 |
| MG89-2 | 484 | 1661 | 584 | 1633 | nnnnCC | 566 |

[0130] In some cases, the endonuclease may comprise a variant having one or more nuclear localization sequences (NLSs). The NLS may be proximal to the N- or C-terminus of said endonuclease. The NLS may be appended N-terminal or C-terminal to any one of SEQ ID NOs: 1-549 or 602-1276, or to a variant having at least about 30%, at least about 35%, at least about 40%, at least about 45%, at least about 50%, at least about 55%, at least about 60%, at least about 65%, at least about 70%, at least about 75%, at least about 80%, at least about 85%, at least about 90%, at least about 95%, at least about 96%, at least about 97%, at least about 98%, or at least about 99% identity to any one of SEQ ID NOs: 1-549 or 602-1276. The NLS may be an SV40 large T antigen NLS. The NLS may be a c-myc NLS. The NLS can comprise a sequence with at least about 80%, at least about 85%, at least about 90%, at least about 95%, at least about 99% identity to any one of SEQ ID NOs: 586-601. The NLS can comprise a sequence substantially identical to any one of SEQ ID NOs: 586-601. The NLS can comprise any of the sequences in Table 2 below, or a combination thereof:

TABLE 2
Example NLS Sequences that can be used
with Cas Effectors According to the
Disclosure

| | | SEQ |
|---|---|---|
| | NLS amino | ID |
| Source | acid sequence | NO: |
| SV40 | PKKKRKV | 586 |
| nucleoplasmin | KRPAATKKAGQA | 587 |
| bipartite NLS | KKKK | |
| c-myc NLS | PAAKRVKLD | 588 |
| c-myc NLS | RQRRNELKRSP | 589 |
| bRNPAI M9 NLS | NQSSNFGPMKGGNF | 590 |
| | GGRSSGPYGGGGQY | |
| | FAKPRNQGGY | |
| Importin-alpha | RMRIZFKNKGKDTA | 591 |
| IBB domain | ELRRRRVEVSVELR | |
| | KAKKDEQILKRRNV | |
| Myoma T protein | VSRKRPRP | 592 |
| Myoma T protein | PPKKARED | 593 |
| p53 | PQPKKKPL | 594 |
| mouse c-ab1 IV | SALIKKKKKMAP | 595 |
| influenza | DRLRR | 596 |
| virus NS1 | | |
| influenza | PKQKKRK | 597 |
| virus NS1 | | |
| Hepatitis virus | RKLKKKIKKL | 598 |
| delta antigen | | |
| mouse Mx1 | REKKKFLKRR | 599 |
| protein | | |
| human poly | KRKGDEVDGVDEV | 600 |
| (ADP-ribose) | | |
| polymerase | AKKKSKK | |
| steroid hormone | RKCLQAGMNLEAR | 601 |
| receptor (human) | KTKK | |
| glucocorticoid | | |

[0131] In one aspect, the present disclosure provides for engineered nuclease system comprising: (a) an endonuclease configured to have selectivity for a protospacer adjacent motif (PAM) sequence comprising any one of SEQ ID NOs: 550-567, wherein the endonuclease is a class 2, type II Cas endonuclease. In some embodiments, the system further comprises (b) an engineered guide nucleic acid structure configured to form a complex with the endonuclease comprising: (i) a targeting nucleic acid sequence configured to hybridize to a target deoxyribonucleic acid sequence; and (ii) a tracr ribonucleic acid sequence configured to bind to the endonuclease. In some embodiments, the endonuclease is derived from an uncultivated microorganism. In some embodiments, the endonuclease has not been engineered to bind to a different PAM sequence than a native PAM sequence of the endonuclease. In some embodiments, the endonuclease is not a Cas9 endonuclease, a Cas14 endonuclease, a Cas12a endonuclease, a Cas12b endonuclease, a Cas 12c endonuclease, a Cas12d endonuclease, a Cas12e endonuclease, a Cas13a endonuclease, a Cas13b endonuclease, a Cas13c endonuclease, or a Cas 13d endonuclease. In some embodiments, the endonuclease has less than 80% identity to a Cas9 endonuclease. In some embodiments, the endonuclease further comprises a PI domain comprising a sequence having at least about 80%, at least about 85%, at least about 86%, at least about 87%, at least about 88%, at least about 89%, at least about 90%, at least about 91%, at least about 92%, at least about 93%, at least about 94%, at least about 95%, at least about 96%, at least about 97%, at least about 98%, or at least about 99% sequence identity to any one of SEQ ID NOs: 1277-1641 or 1683, or a variant thereof. In some embodiments, the endonuclease further comprises a PI domain having at least about 80%, at least about 85%, at least about 86%, at least about 87%, at least about 88%, at least about 89%, at least about 90%, at least about 91%, at least about 92%, at least about 93%, at least about 94%, at least about 95%, at least about 96%, at least about 97%, at least about 98%, or at least about 99% sequence identity to a PI domain of any one of SEQ ID NOs: 1-549 or 602-1276. In some embodiments, the endonuclease further comprises a PI domain comprising a sequence having at least about 80%, at least about 85%, at least about 86%, at least about 87%, at least about 88%, at least about 89%, at least about 90%, at least about 91%, at least about 92%, at least about 93%, at least about 94%, at least about 95%, at least about 96%, at least about 97%, at least about 98%, or at least about 99% sequence identity to any one of SEQ ID NOs: 1, 217, 258, 259, 284, 296, 297, 306, 357, 403, 404, 405, 463, 464, 465, 356, or 484, or a variant thereof. In some embodiments, the endonuclease further comprises a PI domain comprising a sequence having at least about 80%, at least about 85%, at least about 86%, at least about 87%, at least about 88%, at least about 89%, at least about 90%, at least about 91%, at least about 92%, at least about 93%, at least about 94%, at least about 95%, at least about 96%, at least about 97%, at least about 98%, or at least about 99% sequence identity to any one of SEQ ID NOs: 259, 296, or 484, or a variant thereof. In some embodiments, the endonuclease further comprises a RuvC domain In some embodiments, the RuvC domain has at least about 80%, at least about 85%, at least about 86%, at least about 87%, at least about 88%, at least about 89%, at least about 90%, at least about 91%, at least about 92%, at least about 93%, at least about 94%, at least about 95%, at least about 96%, at least about 97%, at least about 98%, or at least about 99% sequence identity to a RuvC domain of any one of SEQ ID NOs: 1, 217, 258, 259, 284, 296, 297, 306, 357, 403, 404, 405, 463, 464, 465, 356, or 484, or a variant thereof. In some embodiments, the RuvC domain has at least about 80%, at least about 85%, at least about 86%, at least about 87%, at least about 88%, at least about 89%, at least about 90%, at least about 91%, at least about 92%, at least about 93%, at least about 94%, at least about 95%, at least about 96%, at least about 97%, at least about 98%, or at least about 99% sequence identity to a RuvC domain of any one of SEQ ID NOs: 259, 296, or 484, or a variant thereof. In some embodiments, the endonuclease further comprises an HNH domain In some embodiments, the HNH domain has at least about 80%, at least about 85%, at least about 86%, at least about 87%, at least about 88%, at least about 89%, at least about 90%, at least about 91%, at least about 92%, at least about 93%, at least about 94%, at least about 95%, at least about 96%, at least about 97%, at least about 98%, or at least about 99% sequence identity to an HNH domain of any one of SEQ ID NOs: 1, 217, 258, 259, 284, 296, 297, 306, 357, 403, 404, 405, 463, 464, 465, 356, or 484, or a variant thereof. In some embodiments, the HNH domain has at least about 80%, at least about 85%, at least about 86%, at least about 87%, at least about 88%, at least about 89%, at least about 90%, at least about 91%, at least about 92%, at least about 93%, at least about 94%, at least about 95%, at least about 96%, at least about 97%, at least about 98%, or at least about 99% sequence identity to an HNH domain of any one of SEQ ID NOs: 259, 296, or 484, or a variant thereof. In some embodiments, the endonuclease is configured to have selectivity for a PAM sequence comprising any one of SEQ ID NOs: 553, 555, or 566, or a variant thereof. In some embodiments, the engineered guide nucleic acid structure comprises at least two ribonucleic acid polynucleotides. In some embodiments, the engineered guide nucleic acid structure comprises one ribonucleic acid polynucleotide comprising the guide ribonucleic acid sequence and the tracr ribonucleic acid sequence. In some embodiments, the engineered guide nucleic acid structure comprises a tracr sequence having at least about 80%, at least about 85%, at least about 86%, at least about 87%, at least about 88%, at least about 89%, at least about 90%, at least about 91%, at least about 92%, at least about 93%, at least about 94%, at least about 95%, at least about 96%, at least about 97%, at least about 98%, or at least about 99% sequence identity to any one of SEQ ID NOs: 1645-1662 or wherein the engineered guide nucleic acid structure comprises a sequence having at least about 80%, at least about 85%, at least about 86%, at least about 87%, at least about 88%, at least about 89%, at least about 90%, at least about 91%, at least about 92%, at least about 93%, at least about 94%, at least about 95%, at least about 96%, at least about 97%, at least about 98%, or at least about 99% sequence identity to non-degenerate nucleotides of any one of SEQ ID NOs: 568-585 or 1643-1644. In some embodiments, the engineered guide nucleic acid structure comprises a tracr sequence having at least about 80%, at least about 85%, at least about 86%, at least about 87%, at least about 88%, at least about 89%, at least about 90%, at least about 91%, at least about 92%, at least about 93%, at least about 94%, at least about 95%, at least about 96%, at least about 97%, at least about 98%, or at least about 99% sequence identity to any one of SEQ ID NOs: 1648, 1650, or 1661 or wherein the engineered guide nucleic acid structure comprises a sequence having at least about 80%, at least about 85%, at least about 86%, at least about 87%, at least about 88%, at least about 89%, at least about 90%, at least about 91%, at least about 92%, at least about 93%, at least about 94%, at least about 95%, at least about 96%, at least about 97%, at least about 98%, or at least about 99% sequence identity to non-degenerate nucleotides of any one of SEQ ID NOs: 571, 573, or 584. In some embodiments, the targeting nucleic acid sequence is complementary to a prokaryotic, bacterial, archaeal, eukaryotic, fungal, plant, mammalian, or human genomic sequence. In some embodiments, the targeting nucleic acid sequence is 15-24 nucleotides in length. In some embodiments, the endonuclease comprises one or more nuclear localization sequences (NLSs) proximal to an N- or C-terminus of the endonuclease. the NLS comprises a sequence comprising any one of SEQ ID NOs: 586-601, or a variant thereof. In some embodiments, the system further comprises a single- or double-stranded DNA repair template comprising from 5′ to 3′: a first homology arm comprising a sequence of at least 20 nucleotides 5′ to the target deoxyribonucleic acid sequence, a synthetic DNA sequence of at least 10 nucleotides, and a second homology arm comprising a sequence of at least 20 nucleotides 3′ to the target sequence. In some embodiments, the first or second homology arm comprises a sequence of at least 40, 80, 120, 150, 200, 300, 500, or 1,000 nucleotides. In some embodiments, the system further comprises a source of Mg²⁺. In some embodiments, the endonuclease and the tracr ribonucleic acid sequence are derived from distinct bacterial species within a same phylum. In some embodiments, the endonuclease comprises any one of SEQ ID NOs: 1, 217, 258, 259, 284, 296, 297, 306, 357, 403, 404, 405, 463, 464, 465, 356, or 484: or a variant thereof having at least 55% identity thereto. In some embodiments, the sequence identity is determined by a BLASTP, CLUSTALW, MUSCLE, MAFFT algorithm, or a CLUSTALW algorithm with the Smith-Waterman homology search algorithm parameters. In some embodiments, the sequence identity is determined by the BLASTP homology search algorithm using parameters of a wordlength (W) of 3, an expectation (E) of 10, and a BLOSUM62 scoring matrix setting gap costs at existence of 11, extension of 1, and using a conditional compositional score matrix adjustment. In some embodiments, the PAM sequence is 3′ to the target deoxyribonucleic acid sequence

[0132] In some aspects, the present disclosure provides for a nucleic acid comprising an engineered nucleic acid sequence optimized for expression in an organism, wherein the nucleic acid encodes a class 2, type II Cas endonuclease configured to be selective for a protospacer adjacent motif (PAM) comprising any one of SEQ ID NOs: 550-567. In some embodiments, the endonuclease further comprises a PI domain comprising a sequence having at least at least about 80%, at least about 85%, at least about 86%, at least about 87%, at least about 88%, at least about 89%, at least about 90%, at least about 91%, at least about 92%, at least about 93%, at least about 94%, at least about 95%, at least about 96%, at least about 97%, at least about 98%, or at least about 99% sequence identity to any one of SEQ ID NOs: 1277-1641 or 1683, or a variant thereof, or wherein the endonuclease further comprises a PI domain having at least about 80%, at least about 85%, at least about 86%, at least about 87%, at least about 88%, at least about 89%, at least about 90%, at least about 91%, at least about 92%, at least about 93%, at least about 94%, at least about 95%, at least about 96%, at least about 97%, at least about 98%, or at least about 99% sequence identity to a PI domain of any one of SEQ ID NOs: 1-549 or 602-1276. In some embodiments, the endonuclease further comprises a PI domain comprising a sequence having at least about 80%, at least about 85%, at least about 86%, at least about 87%, at least about 88%, at least about 89%, at least about 90%, at least about 91%, at least about 92%, at least about 93%, at least about 94%, at least about 95%, at least about 96%, at least about 97%, at least about 98%, or at least about 99% sequence identity to any one of SEQ ID NOs: 1, 217, 258, 259, 284, 296, 297, 306, 357, 403, 404, 405, 463, 464, 465, 356, or 484, or a variant thereof. In some embodiments, the endonuclease further comprises a PI domain comprising a sequence having at least about 80%, at least about 85%, at least about 86%, at least about 87%, at least about 88%, at least about 89%, at least about 90%, at least about 91%, at least about 92%, at least about 93%, at least about 94%, at least about 95%, at least about 96%, at least about 97%, at least about 98%, or at least about 99% sequence identity to any one of SEQ ID NOs: 259, 296, or 484, or a variant thereof. In some embodiments, the endonuclease further comprises a RuvC domain. In some embodiments, the RuvC domain has at least about 80%, at least about 85%, at least about 86%, at least about 87%, at least about 88%, at least about 89%, at least about 90%, at least about 91%, at least about 92%, at least about 93%, at least about 94%, at least about 95%, at least about 96%, at least about 97%, at least about 98%, or at least about 99% sequence identity to a RuvC domain of any one of SEQ ID NOs: 1, 217, 258, 259, 284, 296, 297, 306, 357, 403, 404, 405, 463, 464, 465, 356, or 484, or a variant thereof. In some embodiments, the RuvC domain has at least about 80%, at least about 85%, at least about 86%, at least about 87%, at least about 88%, at least about 89%, at least about 90%, at least about 91%, at least about 92%, at least about 93%, at least about 94%, at least about 95%, at least about 96%, at least about 97%, at least about 98%, or at least about 99% sequence identity to a RuvC domain of any one of SEQ ID NOs: 259, 296, or 484, or a variant thereof. In some embodiments, the endonuclease further comprises an HNH domain. In some embodiments, the HNH domain has at least about 80%, at least about 85%, at least about 86%, at least about 87%, at least about 88%, at least about 89%, at least about 90%, at least about 91%, at least about 92%, at least about 93%, at least about 94%, at least about 95%, at least about 96%, at least about 97%, at least about 98%, or at least about 99% sequence identity to an HNH domain of any one of SEQ ID NOs: 1, 217, 258, 259, 284, 296, 297, 306, 357, 403, 404, 405, 463, 464, 465, 356, or 484, or a variant thereof. In some embodiments, the HNH domain has at least about 80%, at least about 85%, at least about 86%, at least about 87%, at least about 88%, at least about 89%, at least about 90%, at least about 91%, at least about 92%, at least about 93%, at least about 94%, at least about 95%, at least about 96%, at least about 97%, at least about 98%, or at least about 99% sequence identity to an HNH domain of any one of SEQ ID NOs: 259, 296, or 484, or a variant thereof. In some embodiments, the endonuclease comprises any one of SEQ ID NOs: 1, 217, 258, 259, 284, 296, 297, 306, 357, 403, 404, 405, 463, 464, 465, 356, or 484, or a variant thereof having at least 55%, at least about 80%, at least about 85%, at least about 86%, at least about 87%, at least about 88%, at least about 89%, at least about 90%, at least about 91%, at least about 92%, at least about 93%, at least about 94%, at least about 95%, at least about 96%, at least about 97%, at least about 98%, or at least about 99% sequence identity thereto. In some embodiments, the organism is a bacterial, archaeal, eukaryotic, fungal, plant, mammalian, or human organism,

[0133] In some aspects, the present disclosure provides for an engineered nuclease system comprising: (a) an endonuclease having at least about 80%, at least about 85%, at least about 86%, at least about 87%, at least about 88%, at least about 89%, at least about 90%, at least about 91%, at least about 92%, at least about 93%, at least about 94%, at least about 95%, at least about 96%, at least about 97%, at least about 98%, or at least about 99% sequence identity to any one of SEQ ID NOs: 1-549, 602-1276, or a variant thereof; and (b) an engineered guide nucleic acid structure, wherein the engineered guide RNA is configured to form a complex with the endonuclease and the engineered guide RNA comprises a targeting nucleic acid sequence configured to hybridize to a target nucleic acid sequence. In some embodiments, the endonuclease comprises any one of SEQ ID NOs: 1, 217, 258, 259, 284, 296, 297, 306, 357, 403, 404, 405, 463, 464, 465, 356, or 484, or a variant thereof having at least 55% identity, at least about 80%, at least about 85%, at least about 86%, at least about 87%, at least about 88%, at least about 89%, at least about 90%, at least about 91%, at least about 92%, at least about 93%, at least about 94%, at least about 95%, at least about 96%, at least about 97%, at least about 98%, or at least about 99% sequence identity thereto. In some embodiments, the endonuclease further comprises a RuvC domain In some embodiments, the RuvC domain has at least about 80%, at least about 85%, at least about 86%, at least about 87%, at least about 88%, at least about 89%, at least about 90%, at least about 91%, at least about 92%, at least about 93%, at least about 94%, at least about 95%, at least about 96%, at least about 97%, at least about 98%, or at least about 99% sequence identity to a RuvC domain of any one of SEQ ID NOs: 1, 217, 258, 259, 284, 296, 297, 306, 357, 403, 404, 405, 463, 464, 465, 356, or 484, or a variant thereof. In some embodiments, the RuvC domain has at least about 80%, at least about 85%, at least about 86%, at least about 87%, at least about 88%, at least about 89%, at least about 90%, at least about 91%, at least about 92%, at least about 93%, at least about 94%, at least about 95%, at least about 96%, at least about 97%, at least about 98%, or at least about 99% sequence identity to a RuvC domain of any one of SEQ ID NOs: 259, 296, or 484, or a variant thereof In some embodiments, the endonuclease further comprises an HNH domain In some embodiments, the HNH domain at least about 80%, at least about 85%, at least about 86%, at least about 87%, at least about 88%, at least about 89%, at least about 90%, at least about 91%, at least about 92%, at least about 93%, at least about 94%, at least about 95%, at least about 96%, at least about 97%, at least about 98%, or at least about 99% sequence identity to an HNH domain of any one of SEQ ID NOs: 1, 217, 258, 259, 284, 296, 297, 306, 357, 403, 404, 405, 463, 464, 465, 356, or 484, or a variant thereof. In some embodiments, the HNH domain has at least about 80%, at least about 85%, at least about 86%, at least about 87%, at least about 88%, at least about 89%, at least about 90%, at least about 91%, at least about 92%, at least about 93%, at least about 94%, at least about 95%, at least about 96%, at least about 97%, at least about 98%, or at least about 99% sequence identity to an HNH domain of any one of SEQ ID NOs: 259, 296, or 484, or a variant thereof. In some embodiments, the engineered guide nucleic acid structure comprises a tracr sequence having at least about 80%, at least about 85%, at least about 86%, at least about 87%, at least about 88%, at least about 89%, at least about 90%, at least about 91%, at least about 92%, at least about 93%, at least about 94%, at least about 95%, at least about 96%, at least about 97%, at least about 98%, or at least about 99% sequence identity to any one of SEQ ID NOs: 1645-1662 or wherein the engineered guide nucleic acid structure comprises a sequence having at least 80% identity to non-degenerate nucleotides of any one of SEQ ID NOs: 568-585 or 1643-1644. In some embodiments, the engineered guide nucleic acid structure comprises a tracr sequence having at least about 80%, at least about 85%, at least about 86%, at least about 87%, at least about 88%, at least about 89%, at least about 90%, at least about 91%, at least about 92%, at least about 93%, at least about 94%, at least about 95%, at least about 96%, at least about 97%, at least about 98%, or at least about 99% sequence identity to any one of SEQ ID NOs: 1648, 1650, or 1661 or wherein the engineered guide nucleic acid structure comprises a sequence having at least about 80%, at least about 85%, at least about 86%, at least about 87%, at least about 88%, at least about 89%, at least about 90%, at least about 91%, at least about 92%, at least about 93%, at least about 94%, at least about 95%, at least about 96%, at least about 97%, at least about 98%, or at least about 99% sequence identity to non-degenerate nucleotides of any one of SEQ ID NOs: 571, 573, or 584. In some embodiments, the engineered guide nucleic acid structure is configured to form a complex with the endonuclease and comprises (i) a targeting nucleic acid sequence configured to hybridize to a target deoxyribonucleic acid sequence; and (ii) a tracr ribonucleic acid sequence configured to bind to the endonuclease. In some embodiments, the targeting nucleic acid sequence is complementary to a bacterial, archaeal, eukaryotic, fungal, plant, mammalian, or human genomic sequence. In some embodiments, the targeting nucleic acid sequence is 15-24 nucleotides in length.

[0134] In some aspects, the present disclosure provides for an engineered nuclease system comprising: (a) an engineered guide nucleic acid structure comprising: (i) a tracr sequence having at least about 80%, at least about 85%, at least about 86%, at least about 87%, at least about 88%, at least about 89%, at least about 90%, at least about 91%, at least about 92%, at least about 93%, at least about 94%, at least about 95%, at least about 96%, at least about 97%, at least about 98%, or at least about 99% sequence identity to any one of SEQ ID NOs: 1645-1662; or (ii) a sequence having at least about 80%, at least about 85%, at least about 86%, at least about 87%, at least about 88%, at least about 89%, at least about 90%, at least about 91%, at least about 92%, at least about 93%, at least about 94%, at least about 95%, at least about 96%, at least about 97%, at least about 98%, or at least about 99% sequence identity to non- degenerate nucleotides of any one of SEQ ID NOs: 568-585 or 1643-1644, and (b) a class 2, type II Cas endonuclease configured to bind to the engineered guide nucleic acid structure. In some embodiments, the engineered guide nucleic acid structure comprises a tracr sequence having at least 80% identity to any one of SEQ ID NOs: 1648, 1650, or 1661 or wherein the engineered guide nucleic acid structure comprises a sequence having at least 80% identity to non-degenerate nucleotides of any one of SEQ ID NOs: 571, 573, or 584. In some embodiments, the engineered guide nucleic acid structure is configured to form a complex with the endonuclease and comprises (i) a targeting nucleic acid sequence configured to hybridize to a target deoxyribonucleic acid sequence; and (ii) a tracr ribonucleic acid sequence configured to bind to the endonuclease. In some embodiments, the targeting nucleic acid sequence is complementary to a bacterial, archaeal, eukaryotic, fungal, plant, mammalian, or human genomic sequence. In some embodiments, the targeting nucleic acid sequence is 15-24 nucleotides in length. In some embodiments, the endonuclease comprises a sequence having at least about 80%, at least about 85%, at least about 86%, at least about 87%, at least about 88%, at least about 89%, at least about 90%, at least about 91%, at least about 92%, at least about 93%, at least about 94%, at least about 95%, at least about 96%, at least about 97%, at least about 98%, or at least about 99% sequence identity to any one of SEQ ID NOs: 1-549, 602-1276, or a variant thereof. In some embodiments, the endonuclease comprises a sequence according to any one of SEQ ID NOs: 1, 217, 258, 259, 284, 296, 297, 306, 357, 403, 404, 405, 463, 464, 465, 356, or 484, or a variant thereof having at least 55%, at least about 80%, at least about 85%, at least about 86%, at least about 87%, at least about 88%, at least about 89%, at least about 90%, at least about 91%, at least about 92%, at least about 93%, at least about 94%, at least about 95%, at least about 96%, at least about 97%, at least about 98%, or at least about 99% sequence identity thereto.

[0135] In some aspects, the present disclosure provides for an engineered guide nucleic acid structure comprising: (a) a targeting nucleic acid sequence comprising a nucleotide sequence that is complementary to a target sequence in a target DNA molecule; and (b) a protein-binding segment comprising two complementary stretches of nucleotides that hybridize to form a double-stranded RNA (dsRNA) duplex, one of which comprising a tracr sequence, wherein the two complementary stretches of nucleotides are covalently linked to one another with intervening nucleotides, and wherein the engineered guide ribonucleic acid polynucleotide is capable of forming a complex with an endonuclease having at least about 80%, at least about 85%, at least about 86%, at least about 87%, at least about 88%, at least about 89%, at least about 90%, at least about 91%, at least about 92%, at least about 93%, at least about 94%, at least about 95%, at least about 96%, at least about 97%, at least about 98%, or at least about 99% sequence identity to any one of SEQ ID NOs: 1-549, 602-1276, or a variant thereof, and targeting the complex to the target sequence of the target DNA molecule. In some embodiments, the endonuclease comprises any one of SEQ ID NOs: 1, 217, 258, 259, 284, 296, 297, 306, 357, 403, 404, 405, 463, 464, 465, 356, or 484, or a variant thereof having at least 55%, at least about 80%, at least about 85%, at least about 86%, at least about 87%, at least about 88%, at least about 89%, at least about 90%, at least about 91%, at least about 92%, at least about 93%, at least about 94%, at least about 95%, at least about 96%, at least about 97%, at least about 98%, or at least about 99% sequence identity thereto. In some embodiments, the targeting nucleic acid sequence is complementary to a bacterial, archaeal, eukaryotic, fungal, plant, mammalian, or human genomic sequence. In some embodiments, the targeting nucleic acid sequence is 15-24 nucleotides in length. In some embodiments, the engineered guide nucleic acid structure comprises a tracr sequence having at least 80% identity to any one of SEQ ID NOs: 1645-1662 or wherein the engineered guide nucleic acid structure comprises a sequence having at least about 80%, at least about 85%, at least about 86%, at least about 87%, at least about 88%, at least about 89%, at least about 90%, at least about 91%, at least about 92%, at least about 93%, at least about 94%, at least about 95%, at least about 96%, at least about 97%, at least about 98%, or at least about 99% sequence identity to non- degenerate nucleotides of any one of SEQ ID NOs: 568-585 or 1643-1644. In some embodiments, the engineered guide nucleic acid structure comprises a tracr sequence having at least 80% identity to any one of SEQ ID NOs: 1648, 1650, or 1661 or wherein the engineered guide nucleic acid structure comprises a sequence having at least about 80%, at least about 85%, at least about 86%, at least about 87%, at least about 88%, at least about 89%, at least about 90%, at least about 91%, at least about 92%, at least about 93%, at least about 94%, at least about 95%, at least about 96%, at least about 97%, at least about 98%, or at least about 99% sequence identity to non-degenerate nucleotides of any one of SEQ ID NOs: 571, 573, or 584.

[0136] In some aspects, the present disclosure provides for an engineered vector comprising any of the nucleic acids described herein. In some embodiments, the vector is a plasmid, a minicircle, a CELiD, an adeno-associated virus (AAV) derived virion, a lentivirus, or an adenovirus

[0137] In some aspects, the present disclosure provides for a cell comprising any of the vectors described herein or any of the nucleic acids described herein. In some embodiments, the cell is a bacterial, archaeal, eukaryotic, fungal, plant, mammalian, or human cell.

[0138] In some aspects, the present disclosure provides for a method of manufacturing an endonuclease, comprising cultivating any of the cells described herein.

[0139] In some aspects, the present disclosure provides for a method for binding, cleaving, marking, or modifying a double-stranded deoxyribonucleic acid polynucleotide, comprising: contacting the double-stranded deoxyribonucleic acid polynucleotide with a class 2, type II Cas endonuclease in complex with an engineered guide nucleic acid structure configured to bind to the endonuclease and the double-stranded deoxyribonucleic acid polynucleotide; wherein the double-stranded deoxyribonucleic acid polynucleotide comprises a protospacer adjacent motif (PAM); and wherein the PAM comprises a sequence according to any one of SEQ ID NOs: 550-567. In some embodiments, the endonuclease further comprises a PI domain comprising a sequence having at least about 80%, at least about 85%, at least about 86%, at least about 87%, at least about 88%, at least about 89%, at least about 90%, at least about 91%, at least about 92%, at least about 93%, at least about 94%, at least about 95%, at least about 96%, at least about 97%, at least about 98%, or at least about 99% sequence identity to any one of SEQ ID NOs: 1277-1641 or 1683, or a variant thereof, or wherein the endonuclease further comprises a PI domain having at least about 80%, at least about 85%, at least about 86%, at least about 87%, at least about 88%, at least about 89%, at least about 90%, at least about 91%, at least about 92%, at least about 93%, at least about 94%, at least about 95%, at least about 96%, at least about 97%, at least about 98%, or at least about 99% sequence identity to a PI domain of any one of SEQ ID NOs: 1-549 or 602-1276. In some embodiments, the endonuclease further comprises a PI domain comprising a sequence having at least about 80%, at least about 85%, at least about 86%, at least about 87%, at least about 88%, at least about 89%, at least about 90%, at least about 91%, at least about 92%, at least about 93%, at least about 94%, at least about 95%, at least about 96%, at least about 97%, at least about 98%, or at least about 99% sequence identity to any one of SEQ ID NOs: 1, 217, 258, 259, 284, 296, 297, 306, 357, 403, 404, 405, 463, 464, 465, 356, or 484, or a variant thereof. In some embodiments, the endonuclease further comprises a PI domain comprising a sequence having at least about 80%, at least about 85%, at least about 86%, at least about 87%, at least about 88%, at least about 89%, at least about 90%, at least about 91%, at least about 92%, at least about 93%, at least about 94%, at least about 95%, at least about 96%, at least about 97%, at least about 98%, or at least about 99% sequence identity to any one of SEQ ID NOs: 259, 296, or 484, or a variant thereof. In some embodiments, the endonuclease further comprises a RuvC domain. In some embodiments, the RuvC domain has at least about 80%, at least about 85%, at least about 86%, at least about 87%, at least about 88%, at least about 89%, at least about 90%, at least about 91%, at least about 92%, at least about 93%, at least about 94%, at least about 95%, at least about 96%, at least about 97%, at least about 98%, or at least about 99% sequence identity to a RuvC domain of any one of SEQ ID NOs: 1, 217, 258, 259, 284, 296, 297, 306, 357, 403, 404, 405, 463, 464, 465, 356, or 484, or a variant thereof. In some embodiments, the RuvC domain has at least about 80%, at least about 85%, at least about 86%, at least about 87%, at least about 88%, at least about 89%, at least about 90%, at least about 91%, at least about 92%, at least about 93%, at least about 94%, at least about 95%, at least about 96%, at least about 97%, at least about 98%, or at least about 99% sequence identity to a RuvC domain of any one of SEQ ID NOs: 259, 296, or 484, or a variant thereof. In some embodiments, the endonuclease further comprises an HNH domain. In some embodiments, the HNH domain has at least about 80%, at least about 85%, at least about 86%, at least about 87%, at least about 88%, at least about 89%, at least about 90%, at least about 91%, at least about 92%, at least about 93%, at least about 94%, at least about 95%, at least about 96%, at least about 97%, at least about 98%, or at least about 99% sequence identity to an HNH domain of any one of SEQ ID NOs: 1, 217, 258, 259, 284, 296, 297, 306, 357, 403, 404, 405, 463, 464, 465, 356, or 484, or a variant thereof. In some embodiments, the HNH domain has at least about 80%, at least about 85%, at least about 86%, at least about 87%, at least about 88%, at least about 89%, at least about 90%, at least about 91%, at least about 92%, at least about 93%, at least about 94%, at least about 95%, at least about 96%, at least about 97%, at least about 98%, or at least about 99% sequence identity to an HNH domain of any one of SEQ ID NOs: 259, 296, or 484, or a variant thereof. In some embodiments, the endonuclease comprises any one of SEQ ID NOs: 1, 217, 258, 259, 284, 296, 297, 306, 357, 403, 404, 405, 463, 464, 465, 356, or 484, or a variant thereof having at least 55%, at least about 80%, at least about 85%, at least about 86%, at least about 87%, at least about 88%, at least about 89%, at least about 90%, at least about 91%, at least about 92%, at least about 93%, at least about 94%, at least about 95%, at least about 96%, at least about 97%, at least about 98%, or at least about 99% sequence identity thereto. In some embodiments, the engineered guide nucleic acid structure comprises a tracr sequence having at least about 80%, at least about 85%, at least about 86%, at least about 87%, at least about 88%, at least about 89%, at least about 90%, at least about 91%, at least about 92%, at least about 93%, at least about 94%, at least about 95%, at least about 96%, at least about 97%, at least about 98%, or at least about 99% sequence identity to any one of SEQ ID NOs: 1645-1662 or wherein the engineered guide nucleic acid structure comprises a sequence having at least about 80%, at least about 85%, at least about 86%, at least about 87%, at least about 88%, at least about 89%, at least about 90%, at least about 91%, at least about 92%, at least about 93%, at least about 94%, at least about 95%, at least about 96%, at least about 97%, at least about 98%, or at least about 99% sequence identity to non- degenerate nucleotides of any one of SEQ ID NOs: 568-585 or 1643-1644. In some embodiments, the engineered guide nucleic acid structure comprises a tracr sequence having at least about 80%, at least about 85%, at least about 86%, at least about 87%, at least about 88%, at least about 89%, at least about 90%, at least about 91%, at least about 92%, at least about 93%, at least about 94%, at least about 95%, at least about 96%, at least about 97%, at least about 98%, or at least about 99% sequence identity to any one of SEQ ID NOs: 1648, 1650, or 1661 or wherein the engineered guide nucleic acid structure comprises a sequence having at least about 80%, at least about 85%, at least about 86%, at least about 87%, at least about 88%, at least about 89%, at least about 90%, at least about 91%, at least about 92%, at least about 93%, at least about 94%, at least about 95%, at least about 96%, at least about 97%, at least about 98%, or at least about 99% sequence identity to non-degenerate nucleotides of any one of SEQ ID NOs: 571, 573, or 584. In some embodiments, the engineered guide nucleic acid structure is configured to form a complex with the endonuclease and comprises (i) a targeting nucleic acid sequence configured to hybridize to a target deoxyribonucleic acid sequence; and (ii) a tracr ribonucleic acid sequence configured to bind to the endonuclease. In some embodiments, the targeting nucleic acid sequence is complementary to a bacterial, archaeal, eukaryotic, fungal, plant, mammalian, or human genomic sequence. In some embodiments, the targeting nucleic acid sequence is 15-24 nucleotides in length.

[0140] In some aspects, the present disclosure provides for a method of editing an AAVS1 locus in a cell, comprising contacting to the cell (a) an RNA-guided endonuclease; and (b) an engineered guide nucleic acid structure, wherein the engineered guide nucleic acid structure is configured to form a complex with the endonuclease and the engineered guide nucleic acid structure comprises a spacer sequence configured to hybridize to a region of the AAVS1 locus, wherein the engineered guide nucleic acid structure comprises a targeting sequence having at least about 80%, at least about 85%, at least about 86%, at least about 87%, at least about 88%, at least about 89%, at least about 90%, at least about 91%, at least about 92%, at least about 93%, at least about 94%, at least about 95%, at least about 96%, at least about 97%, at least about 98%, or at least about 99% sequence identity to at least 18 consecutive nucleotides of any one of SEQ ID NOs: 1665-1666 or a reverse complement thereof. In some embodiments, the engineered guide nucleic acid structure has at least about 80%, at least about 85%, at least about 86%, at least about 87%, at least about 88%, at least about 89%, at least about 90%, at least about 91%, at least about 92%, at least about 93%, at least about 94%, at least about 95%, at least about 96%, at least about 97%, at least about 98%, or at least about 99% sequence identity to any one of SEQ ID NO: 1663 or 1664. In some embodiments, the engineered guide nucleic acid structure is MG71-2-AAVS1-sgRNA-C3 or MG71-2-AAVS1-sgRNA-E2.

[0141] In some aspects, the present disclosure provides for a method of editing a TRAC locus in a cell, comprising contacting to the cell (a) an RNA-guided endonuclease; and (b) an engineered guide nucleic acid structure, wherein the engineered guide nucleic acid structure is configured to form a complex with the endonuclease and the engineered guide nucleic acid structure comprises a spacer sequence configured to hybridize to a region of the TRAC locus, wherein the engineered guide nucleic acid structure comprises a targeting sequence having at least about 80%, at least about 85%, at least about 86%, at least about 87%, at least about 88%, at least about 89%, at least about 90%, at least about 91%, at least about 92%, at least about 93%, at least about 94%, at least about 95%, at least about 96%, at least about 97%, at least about 98%, or at least about 99% sequence identity to at least 18 consecutive nucleotides of any one of SEQ ID NOs: 1668 or 1676-1682, or a reverse complement thereof. In some embodiments, the engineered guide nucleic acid structure has at least about 80%, at least about 85%, at least about 86%, at least about 87%, at least about 88%, at least about 89%, at least about 90%, at least about 91%, at least about 92%, at least about 93%, at least about 94%, at least about 95%, at least about 96%, at least about 97%, at least about 98%, or at least about 99% sequence identity to any one of SEQ ID NOs: 1667 or 1669-1675. In some embodiments, the engineered guide nucleic acid structure is MG73-1-TRAC-sgRNA-G3, MG89-2-TRAC-sgRNA-F1, MG89-2-TRAC-sgRNA-G5, MG89-2-TRAC-sgRNA-E5, MG89-2-TRAC-sgRNA-F5, MG89-2-TRAC-sgRNA-G1, MG89-2-TRAC-sgRNA-E1, MG89-2-TRAC-sgRNA-B1. In some embodiments, the engineered guide nucleic acid structure is configured to form a complex with the endonuclease and comprises (i) a targeting nucleic acid sequence configured to hybridize to a target deoxyribonucleic acid sequence; and (ii) a tracr ribonucleic acid sequence configured to bind to the endonuclease. In some embodiments, the targeting nucleic acid sequence is 15-24 nucleotides in length. In some embodiments, the engineered guide nucleic acid structure comprises a tracr sequence having at least about 80%, at least about 85%, at least about 86%, at least about 87%, at least about 88%, at least about 89%, at least about 90%, at least about 91%, at least about 92%, at least about 93%, at least about 94%, at least about 95%, at least about 96%, at least about 97%, at least about 98%, or at least about 99% sequence identity to any one of SEQ ID NOs: 1645-1662 or wherein the engineered guide nucleic acid structure comprises a sequence having at least 80% identity to non-degenerate nucleotides of any one of SEQ ID NOs: 568-585 or 1643-1644. In some embodiments, the engineered guide nucleic acid structure comprises a tracr sequence having at least about 80%, at least about 85%, at least about 86%, at least about 87%, at least about 88%, at least about 89%, at least about 90%, at least about 91%, at least about 92%, at least about 93%, at least about 94%, at least about 95%, at least about 96%, at least about 97%, at least about 98%, or at least about 99% sequence identity to any one of SEQ ID NOs: 1648, 1650, or 1661 or wherein the engineered guide nucleic acid structure comprises a sequence having at least 80% identity to non-degenerate nucleotides of any one of SEQ ID NOs: 571, 573, or 584. In some embodiments, the RNA guided endonuclease is a class 2, type II Cas endonuclease. In some embodiments, the endonuclease is configured to have selectivity for a PAM sequence comprising any one of SEQ ID NOs: 550-567. In some embodiments, the endonuclease further comprises a PI domain comprising a sequence having at least about 80%, at least about 85%, at least about 86%, at least about 87%, at least about 88%, at least about 89%, at least about 90%, at least about 91%, at least about 92%, at least about 93%, at least about 94%, at least about 95%, at least about 96%, at least about 97%, at least about 98%, or at least about 99% sequence identity to any one of SEQ ID NOs: 1277-1641 or 1683, or a variant thereof, or wherein the endonuclease further comprises a PI domain having at least about 80%, at least about 85%, at least about 86%, at least about 87%, at least about 88%, at least about 89%, at least about 90%, at least about 91%, at least about 92%, at least about 93%, at least about 94%, at least about 95%, at least about 96%, at least about 97%, at least about 98%, or at least about 99% sequence identity to a PI domain of any one of SEQ ID NOs: 1-549 or 602-1276. In some embodiments, the endonuclease further comprises a PI domain comprising a sequence having at least about 80%, at least about 85%, at least about 86%, at least about 87%, at least about 88%, at least about 89%, at least about 90%, at least about 91%, at least about 92%, at least about 93%, at least about 94%, at least about 95%, at least about 96%, at least about 97%, at least about 98%, or at least about 99% sequence identity to any one of SEQ ID NOs: 1, 217, 258, 259, 284, 296, 297, 306, 357, 403, 404, 405, 463, 464, 465, 356, or 484, or a variant thereof. In some embodiments, the endonuclease further comprises a PI domain comprising a sequence having at least about 80%, at least about 85%, at least about 86%, at least about 87%, at least about 88%, at least about 89%, at least about 90%, at least about 91%, at least about 92%, at least about 93%, at least about 94%, at least about 95%, at least about 96%, at least about 97%, at least about 98%, or at least about 99% sequence identity to any one of SEQ ID NOs: 259, 296, or 484, or a variant thereof. In some embodiments, the endonuclease comprises any one of SEQ ID NOs: 1, 217, 258, 259, 284, 296, 297, 306, 357, 403, 404, 405, 463, 464, 465, 356, or 484, or a variant thereof having at least 55% identity, at least about 80%, at least about 85%, at least about 86%, at least about 87%, at least about 88%, at least about 89%, at least about 90%, at least about 91%, at least about 92%, at least about 93%, at least about 94%, at least about 95%, at least about 96%, at least about 97%, at least about 98%, or at least about 99% sequence identity thereto.

[0142] Systems of the present disclosure may be used for various applications, such as, for example, nucleic acid editing (e.g., gene editing), binding to a nucleic acid molecule (e.g., sequence-specific binding). Such systems may be used, for example, for addressing (e.g., removing or replacing) a genetically inherited mutation that may cause a disease in a subject, inactivating a gene in order to ascertain its function in a cell, as a diagnostic tool to detect disease-causing genetic elements (e.g. via cleavage of reverse-transcribed viral RNA or an amplified DNA sequence encoding a disease-causing mutation), as deactivated enzymes in combination with a probe to target and detect a specific nucleotide sequence (e.g. sequence encoding antibiotic resistance int bacteria), to render viruses inactive or incapable of infecting host cells by targeting viral genomes, to add genes or amend metabolic pathways to engineer organisms to produce valuable small molecules, macromolecules, or secondary metabolites, to establish a gene drive element for evolutionary selection, to detect cell perturbations by foreign small molecules and nucleotides as a biosensor.

Lengthy table referenced here
US20240110167A1-20240404-T00001
Please refer to the end of the specification for access instructions.

### EXAMPLES

### Example 1—Metagenomic Analysis for New Proteins

[0143] Metagenomic samples were collected from sediment, soil and animal. Deoxyribonucleic acid (DNA) was extracted with a Zymobiomics DNA mini-prep kit and sequenced on an Illumina HiSeq® 2500. Samples were collected with consent of property owners. Additional raw sequence data from public sources included animal microbiomes, sediment, soil, hot springs, hydrothermal vents, marine, peat bogs, permafrost, and sewage sequences. Metagenomic sequence data was searched using Hidden Markov Models generated based on known Cas protein sequences including type II Cas effector proteins. Novel effector proteins identified by the search were aligned to known proteins to identify potential active sites. This metagenomic workflow resulted in delineation of the MG44, MG46, MG71, MG72, MG73, MG74, MG87, MG88 and MG89 families of class II, type II CRISPR endonucleases described herein.

### Example 2 —Discovery of MG44, MG46, MG71, MG72, MG73, MG74, MG87, MG88 and MG89 Families of CRISPR Systems

[0144] Analysis of the data from the metagenomic analysis of Example 1 revealed new clusters of previously undescribed putative CRISPR systems comprising 9 families (MG44, MG46, MG71, MG72, MG73, MG74, MG87, MG88 and MG89). The corresponding protein and nucleic acid sequences for these new enzymes and their exemplary subdomains are presented as SEQ ID NOs: 1-549 or 602-1276.

### Example 3 —Determination of Protospacer-Adjacent Motifs

[0145] PAM sequences were determined by sequencing plasmids containing randomly-generated PAM sequences that could be cleaved by putative endonucleases expressed in an E. coli lysate-based expression system (myTXTL, Arbor Biosciences). In this system, an E. coli codon optimized nucleotide sequence was transcribed and translated from a PCR fragment under control of a T7 promoter. A second PCR fragment with a tracr sequence under a T7 promoter and a minimal CRISPR array composed of a T7 promoter followed by a repeat-spacer-repeat sequence was transcribed in the same reaction. Successful expression of the endonuclease and tracr sequence in the TXTL system followed by CRISPR array processing provided active in vitro CRISPR nuclease complexes.

[0146] A library of target plasmids containing a spacer sequence matching that in the minimal array followed by 8N mixed bases (putative PAM sequences) was incubated with the output of the TXTL reaction. After 1-3 hr, the reaction was stopped and the DNA was recovered via a DNA clean-up kit, e.g., Zymo DCC, AMPure XP beads, QiaQuick etc. Adapter sequences were blunt-end ligated to DNA with active PAM sequences that had been cleaved by the endonuclease, whereas DNA that had not been cleaved was inaccessible for ligation. DNA segments comprising active PAM sequences were then amplified by PCR with primers specific to the library and the adapter sequence. The PCR amplification products were resolved on a gel to identify amplicons that corresponded to cleavage events. The amplified segments of the cleavage reaction were also used as template for preparation of an NGS library. Sequencing this resulting library, which was a subset of the starting 8N library, revealed the sequences which contain the correct PAM for the active CRISPR complex. For PAM testing with a single RNA construct, the same procedure was repeated except that an in vitro transcribed RNA was added along with the plasmid library and the tracr/minimal CRISPR array template was omitted. For endonucleases where NGS libraries were prepared, seqLogo (see e.g., Huber et al. Nat Methods. 2015 February; 12(2):115-21) representations were constructed and are presented in FIG. 3. The seqLogo module used to construct these representations takes the position weight matrix of a DNA sequence motif (e.g. a PAM sequence) and plots the corresponding sequence logo as introduced by Schneider and Stephens (see e.g. Schneider et al. Nucleic Acids Res. 1990 Oct. 25; 18(20):6097-100. The characters representing the sequence in the seqLogo representations have been stacked on top of each other for each position in the aligned sequences (e.g. PAM sequences). The height of each letter is proportional to its frequency, and the letters have been sorted so the most common one is on top.

### Example 4—(Prophetic) In Vitro Cleavage Efficiency of MG CRISPR Complexes

[0147] Endonucleases are expressed as His-tagged fusion proteins from an inducible T7 promoter in a protease deficient E. coli B strain. Cells expressing the His-tagged proteins are lysed by sonication and the His-tagged proteins are purified by Ni-NTA affinity chromatography on a HisTrap FF column (GE Lifescience) on an AKTA Avant FPLC (GE Lifescience). The eluate are resolved by SDS-PAGE on acrylamide gels (Bio-Rad) and are stained with InstantBlue Ultrafast coomassie (Sigma-Aldrich). Purity is determined using densitometry of the protein band with ImageLab software (Bio-Rad). Purified endonucleases are dialyzed into a storage buffer composed of 50 mM Tris-HCl, 300 mM NaCl, 1 mM TCEP, 5% glycerol; pH 7.5 and stored at −80° C.

[0148] Target DNAs containing spacer sequences and PAM sequences (determined e.g., as in Example 3) are constructed by DNA synthesis. A single representative PAM is chosen for testing when the PAM has degenerate bases. The target DNAs are comprised 2200 bp of linear DNA derived from a plasmid via PCR amplification with a PAM and spacer located 700 bp from one end. Successful cleavage results in fragments of 700 and 1500 bp. The target DNA, in vitro transcribed single RNA, and purified recombinant protein are combined in cleavage buffer (10 mM Tris, 100 mM NaCl, 10 mM MgCl₂) with an excess of protein and RNA and are incubated for 5 minutes to 3 hours, usually 1 hr. The reaction is stopped via addition of RNAse A and incubation at 60 minutes. The reaction is then resolved on a 1.2% TAE agarose gel and the fraction of cleaved target DNA is quantified in ImageLab software.

### Example 5 —(Prophetic) Testing of Genome Cleavage Activity of MG CRISPR Complexes in E. coli

[0149] E. coli lacks the capacity to efficiently repair double-stranded DNA breaks. Thus, cleavage of genomic DNA can be a lethal event. Exploiting this phenomenon, endonuclease activity is tested in E. coli by recombinantly expressing an endonuclease and a tracrRNA in a target strain with spacer/target and PAM sequences which are integrated into its genomic DNA.

[0150] In this assay, the PAM sequence is specific for the endonuclease being tested as determined by the methods described in Example 3. sgRNA sequences are determined based upon the sequence and predicted structure of the tracrRNA. Repeat-anti-repeat pairings of 8-12 bp (generally 10 bp) are chosen, starting from the 5′ end of the repeat. The remaining 3′ end of the repeat and 5′ end of the tracrRNA are replaced with a tetraloop. Generally, the tetraloop is GAAA, but other tetraloops can be used, particularly if the GAAA sequence is predicted to interfere with folding. In these cases, a TTCG tetraloop was used.

[0151] Engineered strains with PAM sequences integrated into their genomic DNA are transformed with DNA encoding the endonuclease. Transformants are then made chemocompetent and are transformed with 50 ng of single guide RNAs either specific to the target sequence (“on target”), or non-specific to the target (“non target”). After heat shock, transformations are recovered in SOC for 2 hrs at 37° C. Nuclease efficiency is then determined by a 5-fold dilution series grown on induction media. Colonies are quantified from the dilution series in triplicate.

### Example 6 —(Prophetic) Testing of Genome Cleavage Activity of MG CRISPR Complexes in Mammalian Cells

[0152] To show targeting and cleavage activity in mammalian cells, the MG Cas effector protein sequences are tested in two mammalian expression vectors: (a) one with a C-terminal SV40 NLS and a 2A-GFP tag, and (b) one with no GFP tag and two SV40 NLS sequences, one on the N-terminus and one on the C-terminus. In some instances, nucleotide sequences encoding the endonucleases are codon-optimized for expression in mammalian cells.

[0153] The corresponding single guide RNA sequence (sgRNA) with targeting sequence attached is cloned into a second mammalian expression vector. The two plasmids are cotransfected into HEK293T cells. 72 hr after co-transfection of the expression plasmid and a sgRNA targeting plasmid into HEK293T cells, the DNA is extracted and used for the preparation of an NGS-library. Percent NHEJ is measured via indels in the sequencing of the target site to demonstrate the targeting efficiency of the enzyme in mammalian cells. At least 10 different target sites were chosen to test each protein's activity.

### Example 7 —Gene Editing Outcomes at the DNA Level for TRAC and AAVS1 in K562 Cells

[0154] Nucleofection of MG71-2, MG73-1, and MG89-2 mRNA along with the matching guide RNA from Table 4 below (500 ng mRNA/150 pmol guide) was performed into K562 cells (200,000) using the Lonza 4D electroporator. Cells were harvested and genomic DNA prepared three days post-transfection. PCR primers appropriate for use in NGS-based DNA sequencing were generated, optimized, and used to amplify the individual target sequences for each guide RNA. The amplicons were sequenced on an Illumina MiSeq machine and analyzed with a proprietary Python script to measure gene editing (FIG. 4).

TABLE 4
sgRNAs and Associated Sequences Targeted within AAVS1 and TRAC Sites Used
in Example 7

| | SEQ | |
|---|---|---|
| sgRNA | ID NO: | Sequence |
| MG71-2- | 1665 | GGAGAGGGTAGCGCAGGGTG |
| AAVS1- | | |
| target site- | | |
| C3 | | |
| MG71-2- | 1666 | GCCCTGCCAGGAGGGGGCTG |
| AAVS1- | | |
| target site- | | |
| E2 | | |
| MG73-1- | 1668 | TCTTGGTTTTACAGATACGAACCT |
| TRAC- | | |
| target site- | | |
| G3 | | |
| MG89-2- | 1676 | ATATCCAGAACCCTGACCOTGCCG |
| TRAC- | | |
| target site- | | |
| F1 | | |
| MG89-2- | 1677 | GGCCACTTTCAGGAGGAGGATTCG |
| TRAC- | | |
| target site- | | |
| G5 | | |
| MG89-2- | 1678 | CGCAGCGTCATGAGCAGATTAAAC |
| TRAC- | | |
| target site- | | |
| E5 | | |
| MG89-2- | 1679 | CGGCCACTTTCAGGAGGAGGATTC |
| TRAC- | | |
| target site- | | |
| F5 | | |
| MG89-2- | 1680 | GCCGTGTACCAGCTGAGAGACTCT |
| TRAC- | | |
| target site- | | |
| GI | | |
| MG89-2- | 1681 | CCCACAGATATCCAGAACCCTGAC |
| TRAC- | | |
| target site- | | |
| E1 | | |
| MG89-2- | 1682 | ATCCTCTTGTCCCACAGATATCCA |
| TRAC- | | |
| target site- | | |
| B1 | | |
| MG71-2- | 1663 | mG*mG*mA*rGrArGrGrGrUrArGrCrGrCrArGrGrGrUrGrGrUrUrUrGrArGrArGrUrGrArGrArArAr |
| AAVS1- | | UrCrArCrGrArGrUrUrCrArArArArArArCrArUrGrArUrUrUrArUrUrCrArArArCrCrGrUrCrUrUr |
| sgRNA- | | CrUrUrCrGrGrArArGrGrCrCrCrCrArCrArGrUrGrUrGrUrGrGrArCrArGrUrArArArGrCrUrUrGr |
| C3 | | CrUrUrCrGrGrCrArArGrCrU*mU*mU*mU |
| MG71-2- | 1664 | mG*mC*mC*rCrUrGrCrCrArGrGrArCrGrGrGrGrCrUrGrGrUrUrUrGrArGrArGrUrGrArGrArArAr |
| AAVS1- | | UrCrArCrGrArGrUrUrCrArArArArArArCrArUrGrArUrUrUrArUrUrCrArArArCrCrGrUrCrUrUr |
| sgRNA- | | CrUrUrCrGrGrArArGrGrCrCrCrCrArCrArGrUrGrUrGrUrGrGrArCrArGrUrArArArGrCrUrUrGr |
| E2 | | CrUrUrCrGrGrCrArArGrCrUmU*mU*mU |
| MG73-1- | 1667 | mU*mC*mU*rUrGrGrUrUrUrUrArCrArGrArUrArCrGrArArCrCrUrGrUrUrArUrArGrUrGrGrGrAr |
| TRAC- | | ArArUrCrArCrUrArUrArArUrArArGrUrGrArArArUrCrGrCrArArGrGrCrUrCrUrGrUrUrCrUrUr |
| sgRNA- | | GrArArCrArUrCrCrUrUrUrArUrUrArUrArArArArCrUrCrCrUrGrCrCrArArUrCrGrGrUrUrGrGr |
| G3 | | GrArGrU*mU*mU*mU |
| MG89-2- | 1669 | mA*mU*mA*rUrCrCrArGrArArCrCrCrUrGrArCrCrCrUrGrCrCrGrGrUrUrGrUrArGrCrUrUrCrCr |
| TRAC- | | UrUrGrArArGrArArArUrUrCrArArCrGrUrUrGrUrUrArCrArArUrArArGrGrUrUrUrUrCrGrArAr |
| sgRNA- | | ArGrArUrUrArCrCrGrArArCrCrCrGrCrCrCrUrCrArCrUrUrArGrGrUrGrArGrGrGrCrU*mU*mU* |
| F1 | | mU |
| MG89-2- | 1670 | mG*mG*mC*rCrArCrUrUrUrCrArGrGrArGrGrArGrGrArUrUrCrGrGrUrUrGrUrArGrCrUrUrCrCr |
| TRAC- | | UrUrGrArArGrArArArUrUrCrArArCrGrUrUrGrUrUrArCrArArUrArArGrGrUrUrUrUrCrGrArAr |
| sgRNA- | | ArGrArUrUrArCrCrGrArArCrCrCrGrCrCrCrUrCrArCrUrUrArGrGrUrGrArGrGrGrCrU*mU*mU* |
| G5 | | mU |
| MG89-2- | 1671 | mC*mG*mC*rArGrCrGrUrCrArUrGrArGrCrArGrArUrUrArArArCrGrUrUrGrUrArGrCrUrUrCrCr |
| TRAC- | | UrUrGrArArGrArArArUrUrCrArArCrGrUrUrGrUrUrArCrArArUrArArGrGrUrUrUrUrCrGrArAr |
| sgRNA- | | ArGrArUrUrArCrCrGrArArCrCrCrGrCrCrCrUrCrArCrUrUrArGrGrUrGrArGrGrGrCrU*mU*mU* |
| E5 | | mU |
| MG89-2- | 1672 | mC*mG*mG*rCrCrArCrUrUrUrCrArGrGrArGrGrArGrGrArUrUrCrGrUrUrGrUrArGrCrUrUrCrCr |
| TRAC- | | UrUrGrArArGrArArArUrUrCrArArCrGrUrUrGrUrUrArCrArArUrArArGrGrUrUrUrUrCrGrArAr |
| sgRNA- | | ArGrArUrUrArCrCrGrArArCrCrCrGrCrCrCrUrCrArCrUrUrArGrGrUrGrArGrGrGrCrU*mU*mU* |
| F5 | | mU |
| MG89-2- | 1673 | mG*mC*mC*rGrUrGrUrArCrCrArGrCrUrGrArGrArGrArCrUrCrUrGrUrUrGrUrArGrCrUrUrCrCr |
| TRAC- | | UrUrGrArArGrArArArUrUrCrArArCrGrUrUrGrUrUrArCrArArUrArArGrGrUrUrUrUrCrGrArAr |
| sgRNA- | | ArGrArUrUrArCrCrGrArArCrCrCrGrCrCrCrUrCrArCrUrUrArGrGrUrGrArGrGrGrCrU*mU*mU* |
| G1 | | mU |
| MG89-2- | 1674 | mC*mC*mC*rArCrArGrArUrArUrCrCrArGrArArCrCrCrUrGrArCrGrUrUrGrUrArGrCrUrUrCrCr |
| TRAC- | | UrUrGrArArGrArArArUrUrCrArArCrGrUrUrGrUrUrArCrArArUrArArGrGrUrUrUrUrCrGrArAr |
| sgRNA- | | ArGrArUrUrArCrCrGrArArCrCrCrGrCrCrCrUrCrArCrUrUrArGrGrUrGrArGrGrGrCrU*mU*mU* |
| E1 | | mU |
| MG89-2- | 1675 | mA*mU*mC*rCrUrCrUrUrGrUrCrCrCrArCrArGrArUrArUrCrCrArGrUrUrGrUrArGrCrUrUrCrCr |
| TRAC- | | UrUrGrArArGrArArArUrUrCrArArCrGrUrUrGrUrUrArCrArArUrArArGrGrUrUrUrUrCrGrArAr |
| sgRNA- | | ArGrArUrUrArCrCrGrArArCrCrCrGrCrCrCrUrCrArCrUrUrArGrGrUrGrArGrGrGrCrU*mU*mU* |
| B1 | | mU |

(r= native ribose base, m= 2'-O methyl modified base, F= 2' Fluro modified base, *= phosphorothioate bond)

[0155] Systems of the present disclosure may be used for various applications, such as, for example, nucleic acid editing (e.g., gene editing), binding to a nucleic acid molecule (e.g., sequence-specific binding). Such systems may be used, for example, for addressing (e.g., removing or replacing) a genetically inherited mutation that may cause a disease in a subject, inactivating a gene in order to ascertain its function in a cell, as a diagnostic tool to detect disease-causing genetic elements (e.g. via cleavage of reverse-transcribed viral RNA or an amplified DNA sequence encoding a disease-causing mutation), as deactivated enzymes in combination with a probe to target and detect a specific nucleotide sequence (e.g. sequence encoding antibiotic resistance int bacteria), to render viruses inactive or incapable of infecting host cells by targeting viral genomes, to add genes or amend metabolic pathways to engineer organisms to produce valuable small molecules, macromolecules, or secondary metabolites, to establish a gene drive element for evolutionary selection, to detect cell perturbations by foreign small molecules and nucleotides as a biosensor.

[0156] While preferred embodiments of the present invention have been shown and described herein, it will be obvious to those skilled in the art that such embodiments are provided by way of example only. It is not intended that the invention be limited by the specific examples provided within the specification. While the invention has been described with reference to the aforementioned specification, the descriptions and illustrations of the embodiments herein are not meant to be construed in a limiting sense. Numerous variations, changes, and substitutions will now occur to those skilled in the art without departing from the invention. Furthermore, it shall be understood that all aspects of the invention are not limited to the specific depictions, configurations or relative proportions set forth herein which depend upon a variety of conditions and variables. It should be understood that various alternatives to the embodiments of the invention described herein may be employed in practicing the invention. It is therefore contemplated that the invention shall also cover any such alternatives, modifications, variations or equivalents. It is intended that the following claims define the scope of the invention and that methods and structures within the scope of these claims and their equivalents be covered thereby.

LENGTHY TABLES
The patent application contains a lengthy table section. A copy of the table is available in electronic form from the USPTO web site (https://seqdata.uspto.gov/?pageRequest=docDetail&DocID=US20240110167A1). An electronic copy of the table will also be available from the USPTO upon request and payment of the fee set forth in 37 CFR 1.19(b)(3).

The application's sequence listing, which the Patent Office published only in electronic form, follows.

SEQUENCE LISTING (1682 sequences)

SEQ ID NO: 1 - protein, 1334 aa, synthetic construct
  REGION 1..1334: note = MG44-1 active effector
MEKFYLGADIGTNSVGIACTDENYELIRAKGKDCWAVRLFDESKTAETRRNFRTSRRRLERRKQRISWLQALFAPYINDETFFIRLNNSQFLPEDKDEILQADKNALFGDEGYTDKNYHVEFPTIYHLREKLIEGGKYDLKLYYLTIHHIVKYRGHFLFEGATMEEIRDIKRLFENLNAVWEATYAENVPHINLAKSDEAKEILLDTKKGLRDKQIALEKLFGENTALMKESIKAMLGGKISPETLFGEEYKDEKSFSFKDMDEEAFDALQSTYGDNFECLNALRSIYNFVAFEKLLCGHKNISSAMIAVYNKHAADLSLLKSFIRSERPNDYNKIFKSTTEKANYVNYIGYTKKGGEKKKVAKCKSDDEFFAYMKKYLSSLDDIKDGATRDKILGEIENGSFLPKILHSDKGLFPRQVNEAELKAIASNMVKYYPETKEIADKIIPLFEYRIPYFVGPLAGVNSWAVRKSGEITPWNIGEKIDLAASNEEFMRKMTSKCSYIFGEDVLPKCSIIYQKFDVLNQLNKLRVNDRPLTVDLKKGIFNELFLKYPKVSDKKIKDYLIRNGHFSPTDGEITLSGKDGEFKASMSSYIQLKRILGDFVDKDLENGGEVCENIILWHTLNTDKKIVYDLIEKRYKNIPEIADSVKALKGLSFKNFGRLSKKFLVDLYSADNETGELVNILDVLYETNENLNEILNDEKYAFGKLVDEANGVADSKITYEDIEKLYVSPAVRRGIWQTVTMIDEYVEAIGRTPDKIFVEVTREDGVKGDAGRTQPRKRQLQEKYKNVSKTYADVISELGDEKYSDMKLRQERLFLYFRQLGKCMYSGQRIDLDRLDTDTYDVDHILPRTFIKDDSLDNKVLVLRSKNAEKADRYPLPQGFSDQQDFWKMLLDKNLIAKTTYDRLTRTEPLGDNDYKDFINRQKVITDQTVKAVAELMKRKYPTAKIVYSKAKNVNDFKNKFDIFKCRETNDLHHARDAYLNVVVGNVYDTVFSNPLDMFRKDGDMWRTYNLKKLFTRDVKGAWDCSRIARIKSICGSHTMAVTRYAYCNKGEFYNQTVYGKDDAGVSSPRKSNGPLSDTKKYGGYKSQTTAYFAIVSSLDKKDNRVKTIEAVPVLVAYRLKNNPKAVEEYFNSYLKSPEVLIPKIKNKQLVSYNGSLVYIAGVTGDRISVHNATQLFTDNKMDEYVNGLLKLLDMDAKKMLVGDEPRYVIKTNRNKEEKLVIDKEKNVELYGYLKNKLCDKIYSGLSAFATFAKNIENGKEKFIDLTIVEQAKVLIQILMMFKRKDILSDLTLIGGSSHSGKILFNKKIDDVNFEIIHLSPAGLRVIKNKV

SEQ ID NO: 2 - protein, 1464 aa, synthetic construct
  REGION 1..1464: note = MG44-2 effector
MENKEIYFGFDMGTENIGFAVCDENYKVKKVNGRKAWGVRFFDTAETAVQRRTYRAARRRLERRKYRITLLQELFYEEIKKKDPNFFFKLNENDLHLEDKEYKTKYSLFNDENFTDKQFYKKYPTIYHLRNALMNEPASDIRLLYLAIHHIVKYRGNFLRSGEINDVTDATEFFEALNNALENLSSEVNDFDNDQKITDIGKFDLSRLNELTSLVKDYTIKRKDKILKAKELLSSKNTSQNKIIEAIFGGVVNVEQIFGKDKYDVELLSKAKFYLSEEVEEFLPILEGELNPTDYEIIVCMKNIYDWQVLLSLLKGKSTLSEAMVDTYNEHKKDLKNLKYIVEKYLPSEKDAMFGEPSTNGKIDDKIDNYTKYIGGGYYGGAKLGRKYEDGKLVVDTSVVSRNGRLGKTCTKEDFYKYVNKLLKNITIDENDEKGKRILEDIKSRIENGDFMPKIVSKDNATIPYQLNENELNKIIEVNKEKYPFLPSADDGIAVSKKIKSLLTFRMPYYVGPVKENANSKNVWAVRKESGRVTPWNLSDKIDLNESREKFITRMTCKCTYLKNEDVLPKNSVLFSKYVALNELNKLKVNDEGIDVDLKQKIFNEVYLNETVNRKNIAKCIKNIIGNDVTLSGIDENLHGNMNTYQKMKKVIGDKVDKYPDMVEDIVKILTIFADDSKAVEELLKERYSSILSVDEIKKLKGFKYSGWGSFSRGLLQGSAMGTHGIMLTDSQGNLKDIIDIMWETNQNFMEIINNEEYDFADAVRGYEKENEIPENLDITYDDVEELYCSPSVKRSIWQAFLMTKELVKLCGVPRKIFIETTRSNTDEKKKTRTQSRKEQITAMYEEAKKQDKYLYKEEIAEMMSKADKKSNGELNSEKIFLYFMQLGKDIYSGKPIDIDQLRDYDVDHIIPQSQVKDDSLNNKVLVHKTLNGKKDNTYPLPSEFRQPALWDNLKKLKLLSDEKYHRLTRTTRISDLEKEKFINRQLVETSQMVKLTRDILERYFEGITGEKKAVEIVMSKAGNVSDFRKDYGLTKSREINDFHHACDAYLNIVVGNVLNEKFSHNKDYRDNQSDKTVDKSYNFRKAFYSSVYSNREKRYVWTAQNKDGYYPTINVVKKELESFDFAMSKKLTTGKGQLYKETIFKAEDNPNMYPRVEKVDKNMVINPRVDVTKYGGLKTSGTAYFVVVDSEENKGKNKGQKRRSIIDIPIYYAKRIENGKTTINEYLETNPRVNLYKPTLAKIEGLKDSKLLVGSLLDFGNYKLRLAGAKEKVLTFHNTNELFVSKGINDYVKELSLVNEKINKDFIKRKTDKGDLSDDEFRRKLFVEQEEEKTRRENDPEQKNKSKILHVTKEKNNELYNLFLDKVTNEKSPYAYLPAYTSFKNTLEKGKEIFYQMDEYDGLRCLLNLIVAFQCNAKTVDASCIGGSKEICRISTTKEITNMHVTFISQSVTGLKEKRIKIN

SEQ ID NO: 3 - protein, 1420 aa, synthetic construct
  REGION 1..1420: note = MG44-3 effector
MSNYDNFRKYGDYYIGLDVGTGSCGWAVTDKSYNILKVSGKSLWGVRLFPTADTAAERRSHRCARRRVFRTSQRLNLLEQLFDPEISKVDVGFFQRLKNSEFKEISKNNLFGDNSYKDKDFFKEYPTIYHLRYKLMNEPVDDIRLLFLAVHHIIKHRGHFLFERLDVNNIGASLPELWEQCCSQFVDISLFSNVSDDFQEIADSLKQNLIDMRDDVINVIRTSSDKRSDLKKVFAQLKSVYDEISDPEVKKSTENKVNRWYLLLLGYKVSAAEIFTIEESDEEGLSCKIKFNSSDYDEQIQKINDEFKGVVESEKAVYDVIKLQEILKDCNSISESKVELFNKHAEELRIFKSLLRERLSESLLAEVNKKVNVAKNEKLTTEPKSFYKEIFEERNKNTEKGKICFYYDITHGDKSANKEAIKGSSIYKRLQILAQILLCSSEINKLSEKEKVLLHRIGDLSIFETQVSADNSVIPYQINLAELDKILKVQSKNFAFLSEKDDAGVSVYDKIKALLTFRIPYYVGPLNNHSKFSWIVKKSQEKIVPWNFESVVDTEKSAEAFIKRMTSKCTYLSGEDVLPKNSIIYSKFMVLNVLNNIRINGMRLDEAQTGLTKKVFDELYCNQINVTQKQLVAYLYNNGFLTSKEELTGFDDEQKVSMSSYVKIKNALGTDNFDINFAESFIKYSTLFPNDYLMIEKRLKREFSSECAKFNGNLSKLCRIKFSGWGRLSEKLLTGLLGHNKNSEFDKNSILGFMLNGKGNLMELLSSEYTFSDLISSENSTLDKNDAFSYQNLVEGLYVSPSVKRMIWQTLLVVREITKKIMGYEPSRIFVEMARGATADQKGKRTNSRKKSILALYDKCRKDFDINEIYSSLEKQDDNKLLSDKIYLYYTQLGKSMYTGNKIELEDLLNNSKQYDIDHIIPQSLTKDDSIDNRVLVERTVNEEKDNNYPLSYQIRENQTQFWKHLLDLGLISKSKFERLIRSTSLSNSEKEGFIARQLVETRQSTKAIAGLLSKLYKKAKIIYPKAGLTADFKQKFDLIKVRELNDLHHAKDAYCNIVVGNVYFEKFTSKYQYVIANNERYSFSTSDTSYIFTNQNEKRLQQSGIWDSRNGCSISVVRKNYYRNNILKTIKQEEVKGKLFDLTLYGPSKATIKKKKHLGCEYGGYDKDYNTFFSFISFISKKKKIYRFIGIPLRIVENSNNIHDSIVQYLLDEKFENPQILIEKLPFPFILKNNETGFLYKVSSYEKANKRITLQQFNSLILSIRSQKILKAIESFERKVKLNDKKVNFVYDEKKSGFSEQDLTNLFSELKSKVENTFFNCLPAVITNVLKNIDLQTYRVKEKDSDERLLTIEQKVHVVVELLKAFQSNGASSDLHDIGESKNSGIVRTTELDFEKYSIINYSVTGFYFIETKLRDLIK

SEQ ID NO: 4 - protein, 1334 aa, synthetic construct
  REGION 1..1334: note = MG44-4 effector
MEKFYLGMDIGTNSVGMACTDENYNLLRAKGVDCWSVRLFDESKTAAERRTFRTARRRLERRKYRISLLQALFAPLIDDKTFFIRLNDSQLLPEDKNAALCGDKNNLFKDSGYTDKEFHMQFPTVYHLRKALLCGGDYDLRHYYLALHHIIKYRGHFLFEGSMSDIRNVSNLFTTLNMSIESVYGDDFFEFNPSLSEAAKEILLDSKKNIREKQSSLEKLYGAEDKIVKEMIKALCGAKISPSVLFGETFKEIKSFSFKELNDEAFDAMASSYGDNYVLLEALRAIYSFITFEKLLAGHPDISSAMISVYEKHKADLRLLKDFLKAESPETYVKVFKSTDEKSNYVNYIGYTKKGGDKKKVKPCNDESFYTYLKKTISAIEAKDEETKAKILLEVENGTFLPKILHSDNGLFPHQVNEDELVKIVSNMVKFHPETSEIAEKLLPLFRFRIPYYVGPLTGVNSWIVKRSDEKITPWNFDEIVDKSASNEAFMRRMTNKCSYLRGEDVLPKASIIYQKYNVLNQLNKLKINDRPLPNVEIKQKIFNELYLKHVKVTDKKIIDFLVRSGEISPEEAKTITLSGKDGEINASMSSYIQLKKILGEFVDSDLESNGGVCEKIILWHTLNTDKSIVEKLILKNYGNIPVIKANIKALKGLSFKDFGRLSEELLTGLFSCDKETGEIVSIMDLLYNTNKNLNEILFDELYNFGELIKAENGETSSEISYKDIEELYVSPAVRRGIWQSLVMADEYVKAIGRAPDKIFIEVTREDGVKGDAGRKLSRKKQLSEKYKALKDGAFNDIIAELNSEEITDMKLRQERLYLYFRQLGKCAYSGKQIDLSALNTDTYDVDHILPRSYTKDDSIDNKVLVLRSCNAEKSDKYPVPAKFRQPELWKLLLDKDLIGKTTFDRLMRTEPLGENDYNDFINRQKVITDQTVKAVAELVKRKYPETKIVYSKAKNVSDFKARFGLFKCRETNNLHHARDAYLNVVVGNVYDTCFSKPIDMFRRVDDEWREYNLKTMFRRNVKGAWDENSLEKVKTIFGKHSMSVSQYAYCNKAEFYNQTVYPKGSSGITAPRKGVGALGDVTKYGGYMSQKTAYFAIVSSVNAKGSRIKTIEAVPVLTAYRLKNDPNALNDYLSSYLDSPEILIPKIKVRQLVSYNGTPVYIAGMTGNQVTAHNAVELFTNSKTDEYVNALLKLLDMNKAGTIKEENGEYIIKTNRNKDRKLVINRESNTALYEELKNRLNKPIYQGLSPFTTFRNNLEKGKEKFENLSVLEQSEVLAQILRFFKCDADKSDLTLIGGSGKSGTIVFNKDITLVDFKIISKSPAGLTERIKTV

SEQ ID NO: 5 - protein, 1335 aa, synthetic construct
  REGION 1..1335: note = MG44-5 effector
MDKFYLGMDIGTNSVGMACTDEEYSLLRANGKDCWAVRLFDESETAVKRRNFRTARRRIVRRRERIKFLQGVFAPFIDDETFFIRLNDSQYYPEDKNGLLNGNKNNLFADKGYTDKDFHKEYPTIFHLRKALMTQPIEDLRLYYLAIHHIIKYRGHFLFEGGMADIRDITKLIENLNAVCGDLFDEDAPNFDVNKSHEAKEILLTYGKDKQKRLESLFGVTSNTGKEIIKGICGYTIKPEKLFAGNYQEEKSFSFKDLTDETFEAMRPTYSDDFSLLESIRAIYNFVTFEKLLEGKEDISSAMIDLYEKHKADLRLLKDFVLNNATREEYNSLFKVIGKENNYAKYVGFTKKGGDKKKATPAQYDEFLPYLKKFITSLTQVTDEETKEKILAEIEAKTFLPKILHADNGLFPHQVNEDELNKILANMAKIHPETECIKDKIKKIFLYRIPYFVGPLAGANGWAVRKAEGKITPWNFDEIIDKAQSNENFMRRMTNMCSYLYGEEVLPKASIIYQKYNVLNQINKLKINDKPINVALKQDIFNQLFLTKKKVTDNAIKDLLVRRGIISEEEKKTIIISGKDGQLNATMSSYLQLKDILGDFVDEDIQKEDSVCEKIILWHTLNTDKNIVVDLIERNFGKIQIIKDNLKQLKGLVFKDFGRLSKRFLTEMKGVDKTTGEFVSILDVLYETNENLNQILFDERYNFGDVIKEENGEKQSEIKYEDIEKLYVSPAVRRGIWQSLKMADEYIQAIGKTPDKIFIEVTREEGVKGDAGRKSSRQKQLLEKYKTIENIELLTESLTNESDLRLRQERLYLYYRQLGRCMYSGEQIDLDSLNTNQYDVDHILPRTYIKDDSLDNKVLVKRSCNATKTDRYPIPNEILGKDVKKHWELLHKKDLISDTTYKRLTRTKPLDEDDYNDFINRQKTITDQTAKAVAELLAQKYPDTKIVYSKAKNVSDFKSKAGLVKCRETNDLHHAKDAYLNIVVGNVYDTCFSTPMSMFRQDGDKWRTYNLKTLFFRNINGAWTSDDNKTLVKVKETFKKQRSINVTRYTYCGKGEFYNQTVYPHDDTGVNAPRKSGSPLKDCAKYGGYKSQNTAYFAVVESEGKKGKIIKTIEAVPVLVTYNLKNNPNAVQEYFESYLTNPKILVPKLKIKQLIKYNGMPCYIAGTTGIQIILHNGVQMFTDGKTDEYINALLKVAEMDKNQTCDKDAETYLIKTNRFKEVKLEVNKQNNIALYDEFINRLSSGLYGKMGSAISYLTNLQSGREIFINLTTLNQSLALLQTLKFFKCNAEMADLSLIGGASHAGKIYISRDITKAEVVLVHQSPCGLTLREQKI

SEQ ID NO: 6 - protein, 1442 aa, synthetic construct
  REGION 1..1442: note = MG44-6 effector
MEKNSKYYVGLDIGTSSVGFCTTDENYNLINKKGCDLWGVMLFDEAQTAEKRRAKRCARRGVQRQKERLMLLRSLFEKEIDKVDPDFFARLKASALWEDDKQAAGIFSRNSLFFDSKLNDKEFFKNNPTIYHLRKKCVEAPAEDIRFLYLAIHNILKHRGNFLSESFNVENLDASGLDVLFSDLQNQIVGDSDLSDYEFLSLSKASNLSKQQKDSLKELDEELSKTHFKVSALAERLASIFDNKNSNITSLLKAISGGVVNAKSIFSTKENELEIDAKIDGFDVEPETFDQFVADVGTIGEQAVSIILSAKNIYDRITFKKILGNNKYFCFAMVDKFELHKEQLRKFKSIMKEFYPDQYNEMFKVTSHAINNYVKYIDGSNYASKEKKISSKCSRADFYKYVKKVLSSNEKAMESDGVKAIIQSIDEDNFLPKLRTSANSVIPYQVNKHELEVILNNAKNKYEFLSEKDDEGLTTIDKILSILEYRIPYFVGPLSTKNSKNAWIVRRTDEKILPWNIESVVDYDKCEQEFIKRMQNNCSYLSNEPVLPKCSLLYSEYMVLQELNNLQINGQKLTREIKEKILEKYKEFGSVKISELKTFLRSEGFVESGDEINISGISDKLMANMNIYKNFNRILNGEIEKHRDEVEDIIAHATYMSDKSRLQRWLNKTYSNILDAKQIKEIKGLKISDWGKFSKKFLDGILGLDERTGELRTIIQIMREEPFNLMEILAKYEFDALNVKQSDKETITYVDIEQLCCSPAVKRGTWQSVKIVQEIQKIMGAKPEKIFIEVTRADDEKMKGKMFDPRKDKMLKTYNSIKADLALMIKDADIKELKDKLSKEPTLDSKKLYLYFTQMGKCMYSGESISLDDIMKDTYDIDHIIPQSVIKDDSFDNLVLVKRQANIDKSNEVVAPEIQKARKPFWQYLNKNKLISNEKLARLLRTEKLSDEEKKDFVARQLVITNQSAKAVIDLFKSVYGSLNVVYSKAKYVSMFRNCEFKFDRDENVKDSTKWEQLKQSLIKCRDMNDLHHAKDAYLNIFVGNVFDEKYSRRFYLKDKLSYGFNLNNAFLKDMPGVLEKEKHLPIVTQTMQSNTPHIGFLSREKTGQFYKETIWGIDKHQKDFDSIEEIKLLKNDESWSGGNIPRKSAKEPLSNTEKYGHLSDATYSYFSVVEYEQKGKTIKRFVEIPYIYAKDIKSDENLIGAVEKIIGVKNCRVIMRKVNPGTIVKIGSGYFKIAGNTGPCIKLHNFNQLFLPVEMNEYFKVVSKVIKSLIDKKELQFDGENIVVIQNRFGDKKLVTKEKNLALYKELVKHLNKAIYKKVSIGAIGRRLKDTYDTFKGLDCVKQVETIKGLLDVINGVSGGDLTSVGESKTCGTLTVNKNINVPISIINYSPTGFYEKEIKLNWWDLEPWWLTHIANLNWDLIIWYAKANKFSVCFWMKFPP

SEQ ID NO: 7 - protein, 1429 aa, synthetic construct
  REGION 1..1429: note = MG44-7 effector
MNKSGKYYVGLDIGTGSCGFCVTDENYNVVRKNGKDLWGVKLFDTASVASERRQKRSARRNLQRQKDRIRLLQGLFSEEINKIDCNFFARINASSLWEEDKEKCGLKSKNSLFFDDLLDDKQFYKDYPTIYHLRNVLMKSPAKDIRYVYLAVHNMLKHRGNFLYESFDMSNDNNFIDLFKLLSEKIDEDENFSKLKFENSVYSADVVEKLKQLERAICDKPFKNGWLEFKLIEILGAKNSNLKGLLKAISGGIVNAKTIFASKENELVFEMDKIPSFSCEDEKYLTFKAEVDNVSEAAGEIIEIAKAINSQIEFKRILGHNESISSALVEKYENHKKQLRFFKDEVVRKYYPNFYKEMFSSKNEMGDVIDCNCYAKYINGCDLFSSGDKGKWIGKCSRENFYNYVKSFLQRREDFAEISEVQKVLDWIDENNFLVKLRTSANSVIPYQINKKELQIILNKASENFPFLKEKDDEGLSVIDKIISIFEFRIPYYVGPLGCKNSENSWIVKKLDEQVLPWNFEKVVDLDKCEDLFIERMQNKCTYLKDENVLPKNSLLYSEFMVLQELNNMKVNGEKLRPNVKVRILNEFKSKGKVSVKNIKLILKEMGLFRGDDNIVISGINEDFKVNLNIYKNFNTILEGELESNVEMVENIIRLATLITDKGRFKKRIEALYPNKLSTEQVKKILGLKIEGWGRLSEKFLTGIRCINRETGEVKSIIDTMMEEPLNLMEVIAKYNIFDLIDKKEEKDKISYEDVKELYCSPSVKRGVWQSVKIVDEITKIMGQTPSKIFVEVTRSDGEKGKEVNSRQKQLKNLYNQIKDIDVSAFGVGNLNDLKQNIESNDVKEFNREKLYLYFLQLGKCMYTGEEIDLNNLYTKDYDIDHIIPQSKIKDDGLTNKVLVKRRENIDKGNRVASQKIISKNKPFWQFLLQKGLISNEKYNRLIREDEYTDDELRGFVSRQLVTTNQSVKAVIDLLKSVYNKDCEVIFSKASNVSAFRNCEFSFGYRNNEMVSDGVENIEKHTYEETDEFKELKNALIKCRDLNDLHHAKDAYLNIVVGNVFYEKYTKKFYFLNNDNSNYNFNLNNAFKHKVDGVFDRDVHIPIIIKNMESNTPIITFLEREKKGAFYKETILKSTYHQSDLNRLSDDEKLKIESVDSQWDGGRVPLKSSKNILSNYKKYGYFTSGQYAYFVLIKYVNEKGKEFKKFVAMPILYVKNIKNSTDLVEAIKQLNGIDNVEILIDKIKIGTILKVGCGYFKLAGNTGDSLVLHNFNQAFLDVKLLSYFKLISKFNFGVKNKVEYKEIDEKIEIKNNRFNQAEYLTKEGNLQIFEALLMQFKLPNYKYVNIGIQAKLLSEKKELFKGLTVKEQIKVINGMMDILVGVNGADLTIMGGSAHAGKLTLNKKIDCKTAISIIYYSNTGFYKREVKIN

SEQ ID NO: 8 - protein, 1351 aa, synthetic construct
  REGION 1..1351: note = MG44-8 effector
MEKFYLGLDIGTDSVGIACTDENYRLLRARRRDLWAVRLFDEAQPAVNRRTKRAARRRLMRRERRIDLLQEIFAPYIGDDTFFLRLNNSPLWLEDKDEKLSGKYCLFADKNYTDKDFHRDYPTIYHLRKELCDGKKKVDIRLFYLAIHHIIKYRGHFLYDGSLAEIRNISKLFAELNDACEEVFTEDAPSFDIEKAEEFKKIATAKKGLNDKCKEIIALFGVKDDLSKNIIKYLVGSKVAPKAVFGERYADEKSFSFKEVSDEEFEGKREVFGDDFVLLEKMREIYNFIAFEKVLNGKECISEAMIDVYNKHKKDLKLLKYFIKNEYGDEAYRTMFKDVDKVNNYANYIGMAKVNGKKVYVKKCVKYDDFKAFLKKLLATKPKSEIVDDYTYDYIMKELEDDRFLPKILNSDNGLFPNQINLAELDKILANLKKFYPETAEITEKVRSIFTFRIPYYVGPLNTYHSDKGGNSWMVRKEDGTILPWNFTDKVNLAASNENFMRRMTNKCTYLSGEDVLPKFSILYQKYNVLNQINKLKINEIPLTVEQKQGLFNDKYLVDPKMSDRKIKDYFVEKGWLTAEEAKSAVISGKDGELNVSMSSYIRLKKILGELVDENLRMCEDIILWHTLNTDKSIVKSLILTKYGDIPAVRNNIAALNGMTGLKDFGKFSEKFLTGINGGEDPVTGEIYTILSVLYDTNMNLNEIINDDRYGFKEAIKEHNLGINQTIEDEIEELYVSPAVKRGISQAMKMVDEYVSAIGRAPDKIFVEVSREDGTKGDAGRSVKRKDNLLKLYESVKKEGIEGYEELLKELKEKETDLSLRSERLYLYYMQLGRCAYSGEPIDLAYLPGDTYDVDHILPRSYTKDDSLDNKVLVKRDKNAIKGDKYPIPYALVTDKARKLWKVWKEKGLISDKKYKLLTRTEPLGADDYNDFINRQKVFTDQTTIAVAKILEARFKESGTKIVYSKAKNVSDFKSDFNIVKCRETNDLHHARDAYLNIVVGNVYDTRFGNVRAYFYRNENDNSFRENNLKYMFTTDTPNAWKTGETAYTVKETLAKPSMAVTRYSYTNKGQFYDETVQKKGANCSAPLKGKGPLSNTEKYGGYTGLTTAYFVVAESDGKKGARMKTIEAIPVYKEYGIKSDEVKIKDYLENECGLKNVKLLVPKLKIKTLVRINGFNAWIAGMTGKQILMHNANEWFTDKDTDDYVNGLGKLNEAAKNGSVDENWEEYVIKTNRKKEIKQVINAENNICLYDKIIEQTSKKIYAGISGASYYRDSLIKCRDEFAKKSTLTQAKTLLQTIKFLKCNAELSNIAEIGGSAAGGILRINKDITKINFEIVHVSPCGLKTIVVKV

SEQ ID NO: 9 - protein, 1417 aa, synthetic construct
  REGION 1..1417: note = MG44-9 effector
MEKNSKYYVGLDIGTSSVGFCATDENYNLINKKGRDLWGVMLFDEAQTAENRRAKRCARRGVQRQKERLMLLRSLFEKEIDKVDPDFFARLKASALWEDDKQAAGIFSRNSLFFDSKLNDKEFFKNNPTIYNLRKKCVEAPAEDIRFLYLAIHNILKHRGNFLSESFNVENLDASGLDVLFSDLQNQIVGDSDLSDCEFLSLSKANSLSKQQKDSLKELDDELSKTHFKVSALAERLASIFDNKNSNITSLLKAISGGVVNAKSIFSTKENELEIDAKIDGFDVEPETFDQFVADVGTIGEQAVSIILSAKNIYDRITFKKILGNNKYFCFAMVDKFKLHKEQLRKFKDVMKEFYPDQYNEMFKVTSHAINNYVKYIDGSNYASKEKKISSKCSRADFYKYVKKVLSLNEKAMENDGVKAIIQSIDEDNFLPKLRTSANSVIPYQVNKHELEVILNNAKNKYEFLSEKDDEGLTTIDKILSILEYRIPYFVGPLSTKNSKNAWIVRRTDEKILPWNIESVVDYDKCEQEFIKRMQNNCSYLSSEPVLPKCSLLYSEYMVLQELNNLQINGQKLTREIKEKILEKYKEFGSVKISELKMFLRSEGFVESGDEISISGISDKLMANMNIYKNFNRILNGEIEKHRDEVEDIIAHATYMSDKSRLQRWLNKTYSNILDAKQIKEIKGLKISDWGKFSKKFLDGILGLDQRTGELRTIIQIMSEEPLNLMEILAKYEFDALNVKQSDKETITYDDIEQLYCSPAVKRGTWQSVKIVQEIQKIMGAKPEKIFIEVTRADDEKMKGKMFDPRKDKMLKTYNSIKADLALMIKDADIKELKDKLSKEPTLDSKKLYLYFTQMGKCMYSGESISLDDIMKDTYDIDHIIPQSVIKDDSFDNLVLVKRQANIDKSNEVVAPKIQKARKSFWQYLNKNKLISNEKLARLLRTEKLSDEEKKDFVARQLVITNQSAKAVIDLFKSVYGSLNVVYSKAKYVSMFRNCEFKFDRDENVKDSTKWEQLKQSLIKCRDMNDLHHAKDAYLNIFVGNVFDEKYSRRFYLKDKLSYGFNLNNAFLKDMPGVLEKEKHLPIVTQTMQSNTPHIGFLSREKTGQFYKETIWGIDKHQKDFDSIEEIKLLKNDESWSGGNIPRKSAKEPLSNTEKYGHLSDATYSYFSVVEYEQKGKTIKRFVEIPYIYAKDIKSDEDLIGAVEKIIGVKNSRVIMRKVNPGTIVKIGSGYFKIAGNTGPCIKLHNFNQLFLPVEMNEYFKVVSKVIKSLIDKKELQFDGENIVVIQNRFGDKKLVTKEKNLALYKELVKHLNKAIYKKVSIGAIGRRLKDTYDTFKGLDCVKQVETIKGLLDVINGSNGGNLENVGESKNCGTIKINKNINVPISIINYSPTGFYEKEIKLNWWDLEPWWLTHIAS

SEQ ID NO: 10 - protein, 1404 aa, synthetic construct
  REGION 1..1404: note = MG44-10 effector
MENSSKYYVGLDIGTSSVGFCVTDEDYNVINKKGHDLWGVMLFNQAETAAVRRTKRCERRGVQRQKERLMLLRNLFEDEINKVDHNFFARMKASALWEDDKQAVGIFSRNSLFFDNMLNDKEFYKKYPTIYHLRKACIEAPAEDIRFLYLAIHNMLKHRGNFFSDSFNVENLDSSGLDVLFGELQNQIVGDLDSSDFNFLSLSNSNSLSKEQKDELKNLDAELSKNHFKIGVLSNRLSSIFDNNTANQTALIKAISGGVVNAKSIFSTKTNEIEIDAKINGFDVEPDNFDQFISDIGILGDQAVSIILAAKNIYDRITFKKILGKNEYFCFAMVDKFNLHKIQLRNFKNVIKELYADKYKEMFKVYDHSINNYVKYIDGSNYKLKEKKKDSKCSRSDFYKYVKKVFESNEKALQDERVKEILKLIDEDNFLLKLRTSANSVIPYQVNKHELEIILKNAKDKYEFLSRKDENGLTTIDKINSILEYRIPYFVGPLSTKNSKNAWIIRKTDEKIFPWNIKDVVDYDKCEQEFIKRMQNNCGYLAGEAVLSKCSLLYTEYMVLQELNNLRINGQRLPSDIKAKILEIYKQYGSIKISELKSFLRQEGFVENSDEINISGLAADKFTANLNIYKNFNIILNGEIEKYRNEVEDIIAHATYISDKVRLQKWITKTYSYFLNEKQIKEIKGLKISDWGKFSKKFLDGILGVDPRTGELRTIIQIMREEPLNLMEILAKYEFDALNVKQGDEDNITYDDIENIYCSPAVKRGVWQSVKIVQEIQKIMGQKPEKIFIEVTRADDENLKGKIIDPRKDKILKTYGSIKADLSLMIKAEDIKELKSRLDKEPTLDSKKLYLYFTQMGKCMYSGEPILLDDLMKDTYDIDHIIPQSVIKDDSFDNLVLVKRQVNIDKSNEVISPEIQKARRNFWQYLNKNKLISNQKLSRLLRTDGLTEEEKRDFVARQLVVTNQSAKAVLDLFKTVYGSMNVVYSKAKYVSMFRNCEFKFNRYENTEETEQNIKLKQSLIKCRDMNNLHHAKDAYLNIFVGNVFNEKYSKNFYLKDNFSFGFNINNAFLSNMNGVLVKEKHIPIVIKTMESNTPFVGFLPREKHGQFYKATIYGTDKHQKDFESINDIKLLKNSDGWDGGNIPRKSLDNPLSNTHKYGHLSDATYSYFTVIEYMNNNKHIRKFVEIPYIYAKDIKDNNDLTKIVERLTGVGNFNIIVKKITPGSIIKIGCGYFKIAGNTCDRIKLHNFNQLYLPTEMNEYFKLVSKIIKNITDKKELQYEGDNIIVVQNRFGEKKLITKEQNLILYKELVKHFNKAIYKNVSIGEIGKKLKDTYTIFYNLDCEKQIETINGLLNVLNGSSGGNLTNVGESKNSGVLVLSKTINIPISIINFSPTGFYKKEIKLN

SEQ ID NO: 11 - protein, 1429 aa, synthetic construct
  REGION 1..1429: note = MG44-11 effector
MNKSGKYYVGLDIGTGSCGFCVTDENYNVVRKNGKDLWGVKLFDTASVASERRQKRSARRNLQRQKDRIRLLQGLFSEEINKIDCNFFARINASSLWEEDKEKCGLKSKNSLFFDDLLDDKQFYKDYPTIYHLRNVLMKSPAKDIRYVYLAVHNMLKHRGNFLYESFDMSNDNNFIDLFKLLSEKIDEDENFSKLKFENSVYSADVVEKLKQLERAICDKPFKNGWLEFKLIEILGAKNSNLKGLLKAISGGIVNAKTIFASKENELVFEMDKIPSFSCEDEKYLTFKAEVDNVSEAAGEIIEIAKAINSQIEFKRILGHNESISSALVEKYENHKKQLRFFKDEVVRKYYPNFYKEMFSSKNEMGDVIDCNCYAKYINGCDLFSSGDKGKWIGKCSRENFYNYVKSFLQRREDFAEISEVQKVLDWIDENNFLVKLRTSANSVIPYQINKKELQIILNKASENFPFLKEKDDEGLSVIDKIISIFEFRIPYYVGPLGCKNSENSWIVKKLDEQVLPWNFEKVVDLDKCEDLFIERMQNKCTYLKDENVLPKNSLLYSEFMVLQELNNMKVNGEKLRPNVKVRILNEFKSKGKVSVKNIKLILKEMGLFRGDDNIVISGINEDFKVNLNIYKNFNTILEGELESNVEMVENIIRLATLITDKGRFKKRIEALYPNKLSTEQVKKILGLKIEGWGRLSEKFLTGIRCINRETGEVKSIIDTMMEEPLNLMEVIAKYNIFDLIDKKEEKDKISYEDVKELYCSPSVKRGVWQSVKIVDEITKIMGQTPSKIFVEVTRSDGEKGKEVNSRQKQLKNLYNQIKDIDVSAFGVGNLNDLKQNIESNDVKEFNREKLYLYFLQLGKCMYTGEEIDLNNLYTKDYDIDHIIPQSKIKDDGLTNKVLVKRRENIDKGNRVASQKIISKNKPFWQFLLQKGLISNEKYNRLIREDEYTDDELRGFVSRQLVTTNQSVKAVIDLLKSVYNKDCEVIFSKASNVSAFRNCEFSFGYRNNEMVSDGVENIEKHTYEETDEFKELKNALIKCRDLNDLHHAKDAYLNIVVGNVFYEKYTKKFYFLNNDNSNYNFNLNNAFKHKVDGAFDRDVHIPIIIKNMESNTPIITFLEREKKGAFYKETILKSTYHQSDLNRLSDDEKLKIESVDSQWDGGRVPLKSSKNILSNYKKYGYFTSGQYAYFVLIKYVNEKGKEFKKFVAMPILYVKNIKNSTDLVEAIKQLNGIDNVEILIDKIKIGTILKVGCGYFKLAGNTGDSLVLHNFNQAFLDVKLLSYFKLISKFNFGVKNKVEYKEIDEKIEIKNNRFNQAEYLTKEGNLQIFEALLMQFKLPNYKYVNIGIQAKLLSEKKELFKGLTVKEQIKVINGMMDILVGVNGADLTIMGGSAHAGKLTLNKKIDCKTAISIIYYSNTGFYKREVKIN

SEQ ID NO: 12 - protein, 1417 aa, synthetic construct
  REGION 1..1417: note = MG44-12 effector
MEKNSKYYVGLDIGTSSVGFCATDENYNLINKKGRDLWGVMLFDEAQTAEKRRAKRCARRGVQRQKERLMLLRSLFEKEIDKVDPDFFARLKASALWEDDKQAAGIFSRNSLFFDSKLNDKEFFKNNPTIYHLRKKCVETPAEDIRFLYLAIHNILKHRGNFLSESFNVENLDASGLDVLFSDLQNQIVGDSDLSDYEFLSLSKASNLSKQQKDSLKELDEELSKTHFKVSALAERLASIFDNKNSNITSLLKAISGGVVNAKSIFSTKENELEIDAKIDGFDVEPETFEQFVADVGTIGEQAVSIILSAKNIYDRITFKKILGNNKYFCFAMVDKFELHKEQLRKFKSIMKEFYPDQYNEMFKVTDHAINNYVKYIDGSNYASKEKKISSKCSRADFYKYVKKVLSSNEKAMESDGVKAIIQSIDEDNFLPKLRTSANSVIPYQVNKHELEVILNNAKNKYEFLSEKDDEGLTTTDKILSILEYRIPYFVGPLSARNSKNAWIVRRTDEKILPWNIESVVDYDKCEQEFIKRMQNNCSYLSNEPVLPKCSLLYSEYMVLQELNNLQINGQKLTREIKEKILEKYKEFGSVKISELKTFLRSEGFVESGDEISISGISDKLMANMNIYKNFNRILNGEIEKHRDEVEDIIAHATYMSDKSRLQRWLHKTYSNILDAKQIKEIKGLKISDWGKFSKKFLDGILGLDQRTGELRAIIQIMREEPLNLMEILAKYEFDALNVKQSDKETITYDDIEQLYCSPAVKRGTWQSVKIVQEIQKIMGAKPEKIFIEVTRADDEKMKGKMFDPRKDKMLKTYNSIKADLALMIKDADIKELKDKLSKEPTLDSKKLYLYFTQMGKCMYSGESISLDDIMKDTYDIDHIIPQSVIKDDSFDNLVLVKRQANIDKSNEVVAPEIQKARKSFWQYLNKNKLISNGKLARLLRTEKLSDEEKKDFVARQLVITNQSAKAVIDLFKSVYGSLNVVYSKAKYVSMFRNCEFKFDRDENVKDSAQWEQLKQSLIKCRDMNDLHHAKDAYLNIFVGNVFDEKYSRRFYLKDKLSYGFNLNNAFLKDMPSVLEKEKHLPIVTQTMQSNTPHIGFLSREKTGQFYKETIWGIDKHQKDFDSLEEIKLLKNDEGWNGGNIPCKSAKEPLSNTEKYGHLSDATYSYFSVVEYEQKGKTIKRFVEIPYIYAKDIKSDEDLIVAVEKIIGVKNCRVIMRKVNPGTIVKIGSGYFKIAGNTGNSIKLHNFNQLFLPVEMNEYFKAVSKAIKSLVDKKELQFDGENIVVIQNRFGDKKLVTKEKNLALYKELVKHLNKAIYKNVSIGAIGKRLKDTYDTFKDLDCVKQIETIKGLLDVINGSNGGNLANVGESKNSGALTVNKNINVPISIINYSPTGFYEKEIKLNWWDLEPWWLTHIAS

SEQ ID NO: 13 - protein, 1413 aa, synthetic construct
  REGION 1..1413: note = MG44-13 effector
MEKNSKYYVGLDIGTSSVGFCATDENYNLINKKGRDLWGVMLFDEAQTAEKRRAKRCARRGVQRQKERLMLLRSLFEKEIDKVDPDFFARLKASALWEDDKQAAGIFSRNSLFFDSKLNDKEFFKNNPTIYHLRKKCVEAPAEDIRFLYLAIHNILKHRGNFLSDSFNVENLDASGLDVLFSDLQNQIVGDSDLSDCEFLSLSKASSLSKQQKDSLKELDEELSKTHFKVSALAERLASIFDNKNSNITSLLKAISGGVVNAKSIFSTKGNELDIDAKIDGFDVEPETFDQFVADVGTIGEQAVSIILSAKNIYDRITFKKILGNNKYFCFAMVDKFKLHKEQLRKFKDVMKEFYPDQYNEMFKVTSHAINNYVKYIDGSNYASKEKKISSKCSRADFYKYVKKVLSSNEKAMENDGVKAIIQSIDEDNFLPKLRTSANSVIPYQVNKHELEVILNNAKNKYEFLSEKDDEGLTTIDKILSILEYRIPYFVGPLSTKNSKNAWIVRRTDEKILPWNIESVVDYDKCEQEFIKRMQNNCSYLSSEPVLPKCSLLYSEYMVLQELNNLQINGQKLTREIKEKILEKYKEFGSVKISELKTFLRSEGFVEGGDEISISGISDKLMANMNIYKNFNKILNGEIEKHRDEVEDIIAHATYMSDKSRLQRWLNKTYSNILDAKQIKEIKGLKISDWGKFSKKFLDGILGLDQRTGELRTIIQIMREEPLNLMGILAKYEFDALNVKQSDKETITYDDIEQLYCSPAVKRGTWQSVKIVQEIQKIMGAKPEKIFIEVTRADDEKMKGKMFDPRKDKMLKTYNSIKADLALMIKDADIKELKDKLSKEPTLDSKKLYLYFTQMGKCMYSGESISLDDIMKDTYDIDHIIPQSVIKDDSFDNLVLVKRQANIDKSNEVVAPKIQKARKPFWQYLNKNKLISNEKLARLLRTEKLSDEEKKDFVARQLVITNQSAKAVIDLFKSVYGSLNVVYSKAKYVSMFRNCEFKFDRDENVKDSAQWKQLKQSLIKCRDMNDLHHAKDAYLNIFVGNVFDEKYSRRFYLKDKLSYGFNLNNAFLKDMPSVLEKEKHLPIVTQTMQSNTPHIGFLSREKTGQFYKETIWGIEKHQKDFDSIEEIKLLKNDEGWKGGNIPRKSAKETLSNTKKYGYLKSAKYSYFSVVEYEQKGKTIKRFVEIPYIYAKDMKSDEDLIDAVEKIIGVKNCSVVIRKVNPGTVVKIGSGYFKIAGNDKDSTIKLHNFNQLYLPVEMNEYFKAVSKVIKSLIDKKELQFDGENIVVIQNRFGDKKLVTKEKNLALYKELVKHLNKAIYKNVSITTIAKRLKTTYDTFKGLDCVKQIGTIKGLLDVINGASGGDLTSVGESKTCGKILVSKIIKEQQISIINYSPTGFYEKEIKLNWWDLELWW

SEQ ID NO: 14 - protein, 1421 aa, synthetic construct
  REGION 1..1421: note = MG44-14 effector
MDKVDKNFYLGLDIGTDSCGWALTDEDYNVVRVKGKKAWGVRLFDDAEVAKERRTKRTARRRLQRKILQAEWLREIFSNEVEKTDPKFFDRLKYSNLFREDKELMGINSKYSLFNDVLKQVYTDKEYYAKYRTVYHLREELLEKPADDIRLLYLAVHSFLTHRGHFLYETAEADKIDITAMYNDVLSKLNELEFENGQIFSLSEVEEKVFTDLLENFKEGLSLREIKENFSNNIGAKNKREKDLAKIIISGKFKLKDLFEVDKEDNIDVDFSSEKYEQETYGKISEILGDDEKLAIVDKFQNIYSSIQLKKLLGEHKYISQAMVAKYELHNKQLKEFKNFISKYYPSKKSYIFRNAGNGDKLVVNNYAHYVYQTLTGGKKQVMQKRAAKDNFYSFVKKILEQEPEIPVDQNFEEYKEYVISLMDKGEFLQKIRSHDNTVLPNSLYMSELKKILEVSFQKFDFLKTIDETGLSGKEKILQIISFRVPYFVGPIGDSKPEFSWAERKEDMSLRPWNLSKIIDLNKAEDGFIQRMTNKCTYLKDKDVLPKDSILYSKFRVLNELNNLKIDGNSISVAVKQSIFNNLFKKEKKVSTKKLLNFLAAENVISADDIKNVSITGIDKEFANNYASFVTFSNRFGEEFVEKNIDIFEKIIKYHTIISDKSRLQERIKREFDIFTDDDIKWLKSLNFSKWGRLSREFLEEILFADRRKQEDLTVKENFSDRYVEKLDNGEVYSVIEALWETNNNLQQLFDRTNYTLGDMIEQTEQKLGRDLTYLDVDEMYCSPAVKRGAWQAIKIINEIKSAIGKYPDKIFVEVTRHDSVKGEKGRKDSRKRNLEKLYNDSKLKEMCKQFSLEYNTLINELNKSDVSNLRSDKLFLYFLQLGKCMYTGEPIEIADLYDDNKYNVDHIIPQSKIKDDSLNNKVLVKMIANKEKDNYYPISDIKPEWQIRQKHFWHMLKDRGLLSAEKLSRLERTEPFNEREEIDFVNRQLVETNQESKAVIDLLRKVVDNPTDIIFSKANAVSDFRKKYEIYKSREVNSLHHAKDAYLNVVVGNVIYNRFTARFWDRRDNDKNSREHVTRNYTKLFEGNVWSCRGDNLVWNKDRDLTRVKAQCEQNNCIVSVMPYVNSNGKFYNDTVYKSKKKDPNTSASFALKGEGKLLSDIEKYGGYNSLSGAYFMVVESEGKNGKIKKTIETVPIIIEYKYRNDPDKQEKIIKYLEEQNNIKITKVIMSVLKYKSTLNIGGGLYTLTGKTNNSLMISNQIQWHINNKNTAYVKTLEKYLSMSDSTKEKLAKADDYIVVSPGIKDKTQEVRITRQENIELYDLVIRQLKKKIYNISSIKGVLNTLENSRRKFNLLNLDEQVKQLNNIIRYLGGSYSVDLILLGGVGRAGATTIGKNITDLDVKVIVQSASGLKRKEIKL

SEQ ID NO: 15 - protein, 1337 aa, synthetic construct
  REGION 1..1337: note = MG44-15 effector
MEKFYVGTDIGTNSAGVACTDENYNLLRVKGKDCWTVRLFDEGKTAVDRRTFRTGRRRLQRRKQRIAWLQDLFAPYMEDETFFIRLNNSQFLPEDKDALLGGDKNTLFAGVYDDKKFHAEFPTVYHLREALMRGGVNDLRLYYLALHHIVKYRGHFLTEGSVDDVRDFGRLLGNLNGVISDVYGDEVPLFSEAAVDEAKNVLLDKTLGIKDRSSKLEKIFGVSDKTSKEIIKGLCGGKISPAVLFGDEYKEEKSFSFKEITDDNFESMRGTYGDNFTVLEVIRSIYGYVIIENLLSGHDDLSSAMIAVYDKHKDDLLALKAFIRSERPEDYNKIFKSTDEKSNYVNYIGYTKKGGDKKKVKKCKDDEFYAYIKKYLQGLTDVKDVAARDKFLKDIEAGSFMQKILHSDNGLFPKQINEYELKKILDNMVKSFPATAEIKDKIVTLFNYKIPYYVGPLAGKEETCWAVKKSNEKITPWNFDDVIDKAKSNEKFMLRMTNKCSYLRGEDVLPKASIIYQKFDTLNQLNKLRVNDELLTVDLKQKIFNELFLKYPKVSDKKIIDLLVREGKISQNDRSEVTLSGKDGEFKASMSSYIHLKNILGDFVDKDLSENGGVCENIILWHTLNTDKNIVVDLIKENYGKIPEIKNAIKQLKGLVFHDFGRLSRKLLCEIYTVKEDTGELWNVLDALYETNENLNELLNDEKFSFGRNIKEENGEMTSDVGYKDVEELYVSPAVRRGIWQTLTVVDEYVKAIGKAPDKIFVEVTREDGIKGDAGRTQSRKRRLQEKFRTVSDAYADVIAELGEERFTDLKLRQERLFLYFRQLGRCMYTGERIDLNSINDITRYDVDHILPRTFIKDDSLDNKVLVLRSKNAKKSDTYPLPAGFSNQRDFWKMLLDKGLIAKVTYDRLTRTEPLREDEYQDFINRQKVITDQTVKVVAELFKRRYPTAKIVYSKAKNVNDFKQKFDFFKCRETNDLHHARDAYLNVVVGNVYDTVFTTPMSMYRKDGDVWRTYNLNKLFTRDVKGAWDNAQSIATVKKVYSKNSMVVTRYATCNNGGFYDQTIYGKDEKGITAPRKGKGPLSDSSKYGGYMTQPTAYFAVVSSKDKNGNEVKTIEAVPVLTAYMAKNDPKAVERYFSERLKDAKIIVPKIKGKQLVSYNGTQCYLAGITGKQILVHNAVQLFTDGKTDEYVNSLLKLADMKAKGVINVGQEEFVMKTNRGGERKLVIDRANNADLYGMLKRKLERKNYAGLSAFATFRKNLEKGEKKFNSLTVYEQTVVLLQILKFFKCNAETADITLIGGSGRSGVISINKSVTDVDFRLIDLSPAGLTERVRKV

SEQ ID NO: 16 - protein, 423 aa, synthetic construct
  REGION 1..423: note = MG44-16 effector
MSNYDNFKKYGDYYIGLDVGTGSCGWAVTDKSYNILKVSGKSLWGVRLFPTADTAAERRAHRCARRRVFRTRQRLNLLEQLFDPEISKVDVGFFQRLKNSEFKEISKNNLFGDNSYKDKDFFKEYPTIYHLRYKLMNEPVDDIRLLFLAVHHIIKHRGHFLFERLDVNNIGASLPELWEQCCSQFVDISLFSNVSDDFQEIADSLKQNLIDMRDDVINVIRTSSDKRSDLKKVFAQLKSVYDEISDPEVKKSTENKVNRWYLLLLGYKVSAAEIFTIEESDEEGLSCKIKFNSSDYDEQIQKINDEFKGVVESEKAVYDVIKLQEILKDCNSISESKVELFNKHAEELRIFKSLLRERLSENLLAEVNKKVNVAKNEKLTTEPKSFYKEIFEERNKNTEKGKICFYYDITHGDKSANKEAVMK

SEQ ID NO: 17 - protein, 1131 aa, synthetic construct
  REGION 1..1131: note = MG44-17 effector
MLDPKKNIRDKEQELEKLFGAESKLEKEIIKGMCGAKISPSVLFGESFKEEKSFSFKELNDETFDAMRQTYGDNFALPEALRAIYSFVTFEKLLVGKPDISSAMIAVYEKHKSDLKLLKDFLRAESGEVYGKVFKNTNEKANYVNYVGYTKKGGDKKKVKTCGYEEFRQYFKKAIAAIDAKDKETQNLILSELENGSFLPKILHSDNGLFPHQVNEDELVKIADNMAKNHPETTDMAKKLRKLFLFRVPYFVGPLAGENSWAVRKTDEKVTPWNFDDVIDKAASNEEFMRRMTNHCSILHAEDVLPKCSMIYQKYNVLNQLNKLKINDCPLPSVELKQKIFNELFLKYNKVSDKKIIDLLVRSGEVSPEEARAITLTGKDGELNASMSSYITFKNILGDFADKPENAEILEKIILWHTLNTDKKIVEDLILKHFGKIPEIKNNVKALKGLVFKDFGRLSEKLLTGLKAADKETGELLSIIDILYETNQNLNEILANERYNFAELIKDENGEESDEIGYKDIEELYVSPAVRRGIWQSLIMADEYINAVGKVPDRIFIEFTRTDETKGEAGKKLSRKKQLSDKFKAIKDAEFQDIIAELNSDEITDMKLRQERLYLYFRQLGKCMYSGEQINLSALNDTKTYDVDHILPRSYTKDDSLDNKALVLRDCNAKKADHYPVPSDLRQVKLWKLLHEKELISKKTFDRLMRTEPLGEGDYEDFINRQKVITDQTAKAVAELLQRKYPKTQIVYSRAKNVVDFKNKFDLYKCRETNNLHHARDAYLNIVVGNVYHTCFSTPMAMFYKKDDGWRENNLKTMFTRNVKGAWDENSLQLVKSTFKKHTMAVTQYAFCYNGMFYDQTVYPKGDPGITAPRKGSGALTDVEKYGGYKSQKTSYFAIVQSKGKKGQTIKTIEAVPVLTAYRQRTNPDALLDYFKTYLTEPTILIPKLKVRQLVSYNGTPVYIAGITGDYIIAHNANELFTDNKTDEYVNQLSKLVEMAKNGTISEENGEYIIKTNRNKDVKLTINRQSNIELYDTLKNKLSKPSYQGLSPFSTFRKNLESGEEKFANLSVVDQCTVLLQILKFFKCNAETADIVLIGGSKISGKILFNKDIAGVNFEIVSKSPAGLTERIKKV

SEQ ID NO: 18 - protein, 1376 aa, synthetic construct
  REGION 1..1376: note = MG44-18 effector
MEKFYLGIDVGTNSVGMACTDENYKLLRAKGQDLWSVRLFDEAKTAKERRTFRTARRRLERRKQRIKWLQELFAPYITDKNFFIRLNNSAFLTDDKDELLRRDKNSLFADDNFKDKNFFKEYSTIYHLRKALADGTADDLDLRFYYLALHHIIKYRGNFLYDGSLNDLGDASALFAELNAATIDFFGEEHMYFAPEKVAEAKRILISKSGLNDKKKALNELFDEKSFGADIAPRFKEIITALCGGKFSPKKLFGDEYEEQKNFSLDEISDDDFETKKVEFGDDEVAVLVAMRKIVNYAKFSKIIDGYFGCAAPLSEAMVALYNKHKADLKKLKDFIKTNGTNELYYKFFKSTEEKNNYVNYVGYTRKGGDKKKVEKCKEEEFFAYTKKFLIENFGALTETENEQGKILKEMLASIESKSFLPKILHADKGLMPRQLNQAELNKIVENMQKRMPETKEIAEKIEKLFLYKIPYYVGPLSYAGTIKEKNGVAPGHWAVRNIGKENEKITPWNFDEVINKAASNREFMRRMTNKCTYLRGEDVLPKRSIIYQKFDVLNQLNKLRVNDKPISVELKNKIYNNLFLTKKKVTDKGIKDLLVREGIISEKERGQTELTGKDGEFKANMSSYITFCELFGKEFVDSDLEKSDSVCENIILWHTLNEDKKLVEQLILENYGKIPQIKSNIKVLKGLSFKEFGRLSKRFLTGIAIADKKTGEYVGGVLDVLENTNLNLNELLFDEKYSLAKTLAEENGETDSAVTFDDVNELYVSPAVKRGVWQAIKMADEYVSVLGRVPNKIFVEVTRENDPKKKGVRTFSRKDELLKKYRAMKNAEDYKDVIDALSGNETYDDMKLRSEKLFLYFCQLGRCAYTGERIDLSLLNSAYDVDHILPRTYIKDDSLDNKVLVKREKNATKDDDYPLPQGFTDQRPLWEFLKNAGLMSKTKFDRLTRVEPLNDDDYNYFINRQKVITDQTAKAVAELLQRKYPNTKIVYSKAGNVSDFRDKFSLFKCRETNDLHHARDAYLNVVVGNVYDVCFPSYINTMRKQEDEWRRRNLKNLFLRNREGAWVKDDDLSITSVKNTYGKHTMAVTRMATVGKGGFYNQTVYKKGDAGISVGRKGEGILADFEKYGGYSGLSTAYFAVVGSLDKKGNLKKTIEAVPVLIEYKAKNDKNAVINYFSEYIDSPKIIVPQIKTKQLIRYNGTPFYIAGGSRYDARILAYNASQLFTDNKTDEYFKAVKKLLDMNKEVKQKPESEEFVMKTNNEGVRKLVITRQSNIEKYDLLAAQLGKDFYQVLSPFRNVKKIIDEGKKKFCELLVIDQCYVLMQILSYLQCKGATADLQLIGGSGRSGQIRFNKDITNVDFRIYDTSSTGLFVKESKA

SEQ ID NO: 19 - protein, 1337 aa, synthetic construct
  REGION 1..1337: note = MG44-19 effector
MEKFYIGTDIGTNSAGVACTDENYNLLRVKGKDCWAVRLFDEGKTAVDRRTFRTGRRRLQRRKQRIAWLQDLFAPYMEDETFFIRLNNSQFLPEDKDALLGGDKNTLFAGVYDDKKFHAEFPTVYHLREALMRGGVNDLRLYYLALHHIVKYRGHFLTEGSVDDVRDFGRLLGNLNGVISDVYGDEVPLFSEAAVDEAKNVLLDKTLGIKDRSSKLEKIFGVSDKTSKEIIKGMCGGKISPAVLFGDEYKEEKSFSFKEITDDNFESMRGTYGDNFTVLEVIRSIYGYVIIENLLSGHDDLSSAMIAVYDKHKDDLLALKAFIRSERPEDYNKIFKSTDEKSNYVNYVGYTKKGGYKNKVKKCKDDEFYAYIKKYLQGLTDVKDVAARDKFLKDIEAGSFMPKILHSDNGLFPRQINEVELKKILENMVKSFPATAEIKDKIVTLFNYRIPYYVGPLAGKEETCWAVKKSNEKITPWNFDDVIDKAKSNEKFMLRMTNKCSYLRGEDVLPKASIIYQKFDTLNQLNKLRVNDELLTVDLKQKIFNELFLKYPKVSDKKIIDLLVREGKISQNDRSEVTLSGKDGEFKASMSSYIHLKNILGDFVDKDLSENGGVCENIILWHTLNTDKNIVVDLIKENYGKIPEIKNAIKQLKGLVFHDFGRLSRKLLCEIYTVKEDTGELWNVLDALYETNENLNELLNDEKFSFGRNIKEENGEMTSDVGYKDVEELYVSPAVRRGIWQTLTVVDEYVKAIGKAPDKIFVEVTREDGIKGDAGRTQSRKRRLQEKFRTVSDAYADVIAELGEERFTDLKLRQERLFLYFRQLGRCMYTGERIDLNNINDVTRYDVDHILPRTFIKDDSLDNKVLVLRSKNAKKSDTYPLPAGFSNQRDFWKMLLDKGLIAKVTYDRLTRTEPLREDEYQDFINRQKVITDQTVKVVAELFKRRYPTAKIVYSKAKNVNDFKQKFDLFKCRETNDLHHARDAYLNVVVGNVYDTVFTTPMSMYRKDGDVWRTYNLNKLFTRDVKGAWDNAQSIATVKKVYSKNSMVVTRYATCNNGGFYDQTIYGKEEKGITAPRKGKGPLFDSSKYGGYMTQPTAYFAVVSSKDKNGNEVKTIEAVPVLTAYMAKNDPKAVERYFSERLKDAKIIVPKIKGKQLVSYNGTQCYLAGITGKQILVHNAVQLFTDGKIDEYVNSLLKLADMKTKGVINVGQEEFVMKTNRDGERKLVIDRANNADLYDMLKRKLKRENYAGLSAFATFRKNLEKGEEKFNSLTVYEQTVVLLQILKFFKCNAETADTTLVGGSAKSGKILINNNITNVDFRLIDLSPAGLTERVRKV

SEQ ID NO: 20 - protein, 1337 aa, synthetic construct
  REGION 1..1337: note = MG44-20 effector
MEKFYIGTDIGTNSAGVACTDENYNLLRVKGKDCWTVRLFDEGKTAVDRRTFRTGSRRLQRRKQRIAWLQDLFAPYMEDETFFIRLNNSQFLPEDKDALLGGDKNTLFAGVYDDKKFHTEFPTVYHLREALMRGGVNDLRLYYLALHHIVKYRGHFLTEGSVDDVRDFGRLLGNLNGVISDVYGDEVPLFSEASSSEVKNILLDKTLGIKDRSIELEKIFGVKDKTSKEIIKGLCGGKISPAVLFGDEYKEEKSFSFKEITDENFEGMRATYGDDFALLEGIRSVYGYVTFEKLLSDHTDLSSAMMDVYDKHKKDLLALKAFIRSERPEDYNKIFKSTDEKYNYVNYIGYTKKGGDKKKVKKCKDDEFYAYIKKYLQGLTDVKDVAARDKFLKDIEAGSFMQKILHSDNGLFPKQINEYELKKILENMVKSFPATAEIKDKIVTLFNYRIPYYVGPLAGKEETCWAVKKSNEKITPWNFDDVIDKAKSNEKFMLRMTNKCSYLRGEDVLPKASIIYQKFDTLNQLNKLRVNDELLTVDLKQKIFNELFLKYTKVSDKKIIDLLVREGKISQNDRSEVTLSGKDGEFKASMSSYIYLKNILGDFVDKDLSENGGVCENIILWHTLNTDKNIVVDLIKENYGKIPEIKNAIKQLKGLVFHDFGRLSRKLLCEIYTVKEDTGELWNVLDALYETNENLNELLNDEKFSFGRNIKEENGEMTSDVGYKDVEELYVSPAVRRGIWQTLTVVDEYVKAIGKAPDKIFVEVTREDGIKGDAGRTQSRKRRLQEKFRTVSDAYADVIAELGEERFTDLKLRQERLFLYFRQLGRCMYTGERIDLKNINDVTCYDVDHILPRTFIKDDSLDNKVLVLRSKNAKKSDTYPLPAGFSNQRDFWKMLLDKGLIAKVTYDRLTRTEPLREDEYQDFINRQKVITDQTVKVVAELFKRRYPTAKIVYSKAKNVNDFKQKFDLFKCRETNDLHHARDAYLNVVVGNVYDTVFTTPMSMYRKDGDVWRTYNLNKLFTRDVKGAWDNAQSIATVKKVYSKNSMVVTRYATCNNGGFYNATVYSKDEKGITAPRKGKGPLSDSSKYGGYMTQPTAYFAIVSSKDKNGNEIKTIEAVPVLTAYVAKNDPKAVEKYFTGRLKDAKIIVPKIKIKQLASYNGTLCCLAGTTDNRILVHNAVELFTDGKTDEYVNSLLKLADMKAKGIINVGQEEFVMKTNRDGERKLVIDRANNADLYDMLKRKLERENYAGLSAFATFRKNLEKGEEKFNSLTVYEQTVVLLQILKFFKCNAETADTTLVGGSAKSGSIKFNNNITNVDFRLIDLSPAGLTERVRKV

SEQ ID NO: 21 - protein, 1334 aa, synthetic construct
  REGION 1..1334: note = MG44-21 effector
MEKFYLGADIGTNSVGIACTDENYELIRAKGKDCWAVRLFDESKTAETRRNFRTSRRRLERRKQRISWLQALFAPYINDETFFIRLNNSQFLPEDKDEILQADKNALFGDEGYTDKNYHAEFPTIYHLREKLIEGGKYDLKLYYLAIHHIVKYRGHFLFEGATMEEIRDIKRLFENLNAVWEATYAENVPHINLSKSDEAKEILLDTKKGLRDKQIALEKLFGENTALMKESIKAMLGGKISPETLFGEEYKDEKSFSFKDMDEEAFDALQSTYGDNFECLNALRSIYNFVAFEKLLCGHKNISSAMIAVYNKHAADLSLLKSFIRSERPNDYNKIFKSTTEKANYVNYIGYTKKGGEKKKVAKCKSDDEFFAYMKKYLSSLDDIKDGATQDKILGEIENGSFLPKILHSDKGLFPRQVNEAELKAIASNMVKYYPETKEIADKIIPLFEYRIPYFVGPLAGVNSWAVRKSGEITPWNIGEKIDLAASNEEFMRKMTSKCSYIFGEDVLPKCSIIYQKFDVLNQLNKLRVNDRPLTVDLKKGIFNELFLKYPKVSDKKIKDYLIRNGHFSPTDGEITLSGKDGEFKASMSSYIQLKRILGDFVDKDLKNGGEVCENIILWHTLNTDKKIVYDLIEKRYKNIPEIADSVKALKGLSFKNFGRLSKKFLVDLYSADNETGELVNILDVLYETNENLNEILNDEKYAFGRLVDEANGVADSKITYEDIEKMYVSPAVRRGIWQTVTMIDEYVEAIGRTPDKIFVEVTREDGVKGDAGRTQPRKRQLQEKYKNISETYADVISELGDEKYSDMKLRQERLFLYFRQLGRCMYSGQRIDLDRLDTDTYDVDHILPRTFIKDDSLDNKVLVLRSKNAEKADRYPLPQGFSDQQDFWKMLLDKNLIAKTTYDRLTRTEPLGDNDYKDFINRQKVITDQTVKAVAELMKRKYPTAKIVYSKAKNVNDFKNKFDIFKCRETNDLHHARDAYLNVVVGNVYDTVFSNPLDMFRKDGDMWRTYNLKKLFTRDVKGAWDCSRIARIKSICGSHTMAVTRYAYCNKGEFYNQTVYGKDDAGVSSPRKSNGPLSDTKKYGGYKSQTTAYFAIVSSLDKKGNRVKTIEAVPVLVAYRLKNNPKAVEEYFNSYLKSPEILIPKIKNKQLVSYNGSYAYIAGVTGNQIILHNAAELFTDNKTDEYVNELLKIVDMDAKKMLVGDEPRYVTKTNRYKKEKVVIDKEKNLELYCRLKDKLSDKIYSGLSAFSTFAKNMESGEEKFKELAIVEQAKTLIQILKMFKCNAETSDLKFIGGSSRSGTVYINKKIDGVNFEIIHLSPAGLRVIKNKV

SEQ ID NO: 22 - protein, 1425 aa, synthetic construct
  REGION 1..1425: note = MG44-22 effector
MSNYDNFKKYGDYYIGLDVGTGSCGWAVTDKSYNILKVSGKSLWGVRLFPTADTAAERRAHRCARRRVFRTRQRLNLLEQLFDPEISKVDVGFFQRLKNSEFKEISKNNLFGDNSYKDKDFFKEYPTIYHLRYKLMNEPVDDIRLLFLAVHHIIKHRGHFLFERLDVNNIGASLPELWEQCCSQFVDISLFSNVSDDFQEIADSLKQNLIDMRDDVINVIRTSSDKRSDLKKVFAQLKSVYDEISDPEVKKSTENKVNRWYLLLLGYKVSAAEIFTIEESDEEGLSCKIKFNSSDYDEQIQKINDEFKGVVESEKAVYDVIKLQEILKDCNSISESKVELFNKHAEELRIFKSLLRERLSENLLAEVNKKVNVAKNEKLTTEPKSFYKEIFEERNKNTEKGKICFYYDITHGDKSANKEAIKGSSIYKRLQILAQILLCSSEIYKLSEKEKVLLHRIGDLSIFETQVSADNSVIPYQINLAELDKILKVQSKNFAFLSEKDDAGVSVYDKIKALLTFRIPYYVGPLNNHSKFSWIVKKSQEKIVPWNFESVVDTEKSAEAFIKRMTSKCTYLSGEDVLPKNSIIYSKFMVLNVLNNIRINGMRLDEAQTGLTKKVFDELYCNQINVTQKQLVAYLYNNGFLTSKEELTGFDDEQKVSMSSYVKIKNALGTDNFDINFAESFIKYSTLFPNDYLMIEKRLKREFSSECAKFNENLSKLCRIKFSGWGRLSEKLLTGLLGHNKNSEFDKNSILGFMLNGKGNLMELLSSEYTFSDLISSENSTLDKNDAFSYQNLVEGLYVSPSVKRMIWQTLLVVREITKKIMGYEPSRIFVEMARGATADQKGKRTNSRKKSILALYDKCRKDFDISEIYSSLEKQDDNKLLSDKIYLYYTQLGKSMYTGNKIELEDLLNNSKQYDIDHIIPQSLTKDDSIDNRVLVERTVNEVKDNNYPLSYQIRENQTRFWKHLLDLGLISKSKFERLIRSTSLSNSEKEGFIARQLVETRQSTKAIAGLLSKLYKKAKIIYPKAGLTADFKQKFDLIKVRELNDLHHAKDAYCNIVVGNVYFEKFTSKYQYVIANNERYSFSTSDTSYIFTNQNEKRLQQSGTWDSRNGKSISIVKKYYKRNNILMTYKQEERIGALFNQTLYGPEKGTIPKKKNMSCHDYGGYDSDQNSFFSFISYKDDKGNLKTKLIGIPLRVVYGLSDKSSAISHYLLTEKSNEYIDPKVLIDFLPYNFILKDNETGFLARVVSYATKGRQLVLKQFNSLILNEKNNKMLKAIDNFVSRLKNKSFEVKYDKDKSGFTEEDLSSIYSELKDKTKNTVLKALPKTTVKILTDVDINSYQYSENEKSEPKLLSIEQKAVAICEVIKAFHTEPSDLSLLGGKANSGKMCINSVLNLDKDDYSVVFYSITGFYEKELRLSDLLK

SEQ ID NO: 23 - protein, 1333 aa, synthetic construct
  REGION 1..1333: note = MG44-23 effector
MGKFYLGMDIGTNSVGMACTDENYKLLRAKGKDCWSVRLFDESKTALERRTYRTSRRRLQRRKYRLALLQELFAPFIDDKNFFIRLNNSQFLPEDKDGALFGDKNNLFNDPALDDKTFHGQFPTIYHLRKALIDGGDYDLRLYYLALHHIIKYRGHFLFEGSMNDIRNINRLFTALNDTLKNVYGDDEAPEFAATSAEKAKEILLDPKKNIRDKEQELEKLFGAESKLKKEIIKGMCGAKISPSVLFGESFKEEKSFSFKELTDETFDAMRQTYGDNFALPEALRAIYSFVTFEKLLVGKPDISSAMIAVYEKHKSDLKLLKDFLRAESGEIYGKVFKSTNEKANYVNYVGYTKKGGDKKKVKTCGYEEFKQYLKKTIAAIDAKDKETQNLILSELENGSFLPKILHSDNGLFPHQVNEDELVKIADNMAKNHPETTDMAKKLRKLFLFRVPYFVGPLAGENSWAVRKTDEKVTPWNFDDVIDKAASNEEFMRRMTNHCSILHAEDVLPKCSMIYQKYNVLNQLNKLKINDCPLPSVELKQKIFNELFLKYNKVSDKKIIDLLVRSGEVSPEEARAITLTGKDGELNASMSSYITFKNILGDFADKPENAEILEKIILWHTLNTDKKIVEDLILKHFGKIPEIKNNVKALKGLVFKDFGRLSEKLLTGLKAADKETGELLSIIDILYETNQNLNEILANERYNFAELIKAENGEESDEIGYKDIEELYVSPAVRRGIWQSLIMADEYINAVGKVPDRIFIEFTRTDETKGEAGKKLSRKKQLSDKFKAIKDAEFQDIIAELNSDEITDMKLRQERLYLYFRQLGKCMYSGKNIDLSLLNTDTYDVDHILPRSYTKDDSLDNKALVLRDCNAKKADHYPVPSDLRQVKLWKLLHEKELISKKTFDRLMRTEPLGEGDYEDFINRQKVITDQTAKAVAELLQKKYPTSQIVYSKAKNVVDFKNKFGLYKCRETNNLHHARDAYLNIVVGNVYHTCFSTPMAMFYKKDDGWRENNLKTMFTRNVKGAWDENSLQFVKSTFEKHTMAVSQYAFCYNGMFYDQTVYPKGDPGITAPRKGNGALADVEKYGGYKSQKTSYFAIVQSKGKKGQTIKTIEAVPVLTAYRQRTNPDALLDYFKTYLTEPTILIPKLKVRQLVSYNGTPVYIAGVTDNQIGVNNATELFTDNKTDEYVNQLSKLVEMAKNGTISEENGEYIIKTNRNKDVKLTINRQSNIELYDTFKDRLSKPIYQGLSPFSTFRKNLESGEEKFANLSVTDQCTVLLQILKFFKCNADTADISLIGGGETCGRIRFNKDISKVNFEIVCKSPAGLTERIKKV

SEQ ID NO: 24 - protein, 1417 aa, synthetic construct
  REGION 1..1417: note = MG44-24 effector
MNKEIYLGLDIGTNSCGYAVTDSNYNLVRIAGHDAWGVRLFEEAQTAKERRINRATRRRIVRKKLQNNWLQELFKSEVEKVDPSFFTRLKFSNLDKEDKEKSDKNLTSKYSLFNDMVEEIFTDKQYYDKYKTVYHLRKSLLTNPAEDIRLLYLAVHSILTHRGHFLYETDFSNNQSNDTLKADFVSLLEKLKTYGEENFDAKNNLTLTGDRANCVMSLIKDFDNGLPYKQIKENFETELGVKTKLDKTLASILISGKFKTSDIFDVDKEDAIKIDFNDANFEEQYGEIISSLKDVEVEILTLLQAIYANIQLKKLLGENNYICQAMVERYEKHNKQLQELKKFVKTYFPSKKKIIFNAGHKPSKNGKNEKKENTQYNNYAAYCYSDICSGKKRVLYKKASQEDFYKFLKSELFECDVENNVELDKYEERKQNILNAIEKNDFLLKLRSNDNILLPNSLYQAELKQILKVSAQKFNFLNNKDANGHSVGQKIIDVVSFRVPYFVGPIGESENGWIRKDKSADFKPWTLDKIIDLDEAENRFIQNMTNKCTYLPTEDVLPQKSLLYSKFRVLNELNNLKINGNAITVEIKQQIFDGLFKKMPKVSTKKLVEFLKQYNIINKNDSNVVFTGIDKEFANDYSSYVTFATKFGEEFVNKNLEVFEKIIKYHTIISDKSRLAKRLKREFNIFSDEDIKFLKSLNFSGWGSLSQKFLEGLKFSDKKSANPEMETLTVMSVLWETNKNLQEIIFCKTYDLQQKLDANIQKIQRDLLYDDIQNMYTSPAVKRGTWQAISIINELKNKLGKYPDKIFVEVTRNNQEKGEAGRKDSRHKMVVKKYKDKQLKLDCQKLCIEFNKLMEELNQKDNSNLRSEKLYLYFMQLGKDIYTGKPIDISQLNNDNMYNVDHIIPRCKVKDDSIDNKVLVSAAANLAKSDNYPIDGHIQASQKAFWELLRENGLMTDSKLARLQRTEEFTEKDADNFTNQQLVSTNQESKAVIDLLSKVYSNKRNIIFSKAMFVSDFRKNFNINKSRDVNALHHAQDAYLNVVVGNVLFNRFTEGYWKKNTQENNNQTADKNANTTSVVEKLFRRTVWSNQTGEVVWKGQPSIDLVRKNCEKNSPCISIMPYENKNGMFYNATVYKSSKNHSATPASFALKAKGPLSSIDKYGGYNSLKNAYFIAVESVDANGTVNKTIETVPIIVEYQYRNDANKTQKIIEYIEKTNNIKITKVIKDKIKYRSLLKIDGGLYMLTAKTNDSLKLLKLNQWFLSNKDIGYIKILEKYQNMPATIKELLKTTDEEIIVSPAVKTNSKQLAISRTNNVYLYDLIIAQLGKKIYSLSSISGLVKKLTNARSVFLSLSISAQAELLLGLVKYVGGAYNVDLALLGESQYAGSTTIGKNISNLNISLIEQSVTGLYAKETVL

SEQ ID NO: 25 - protein, 1462 aa, synthetic construct
  REGION 1..1462: note = MG44-25 effector
MINNLNLSECLDDVVTKEPSDVVTKEPSDVVSQKDGYYVGLDIGTGSCGWAVTDTKYQVLKKSKKRLWGVRLFPTANTAAERRTFRCNRRRLQRRNWRLNLLKGLFEAEINKVDPAFFMRMKESMLQDDDRTTTARNALFADENYKDKNYAEEYPTIYHLRLNLMEKAPKDIRLLYLAIHHILKHRGHFLFENFNVDNISGSFETIWRNVSNIIVEKVFLNPNLESESIDDDGDDGDLNNNAIERLQSHGQEVLQQLLSLNRNRTDVKKRLLSIFEEALGEKADKKKKKSIEQCVAALVGAKFKPFVCVSDDEPEEEQLKIELCFGSANYETDFATKLGSTQQSVFAILKEVYDFVRLQNLLGGRKSISEAKVEMYKEHSKDLIVLKDLIRNSDHLQDNEKTFLYNNVFKKYDAPVKCVGECLYETILRYRALEIKSTTNKDLAPAKALYGQLMEIAQKFIEMNAAGAVIEPDILKVCNRIVDGTIFSHAVSVENSVIPQQLHAFELKKILENAKAQFPFLNESDEFGTVVDKIIKLHSFRIPYYVGPVNNYVGELNNSGNKHAWCVKNEGVNLPYTPWTFHKIVDTKKSAQEFINRMTSKCTYLRYADVLPKCSILYSEFEVLQELNNIRFNGCKLKHEQISLLIEELYKKDKNVTLKKLKNFLVSRMGFSREDVEVVSGIDLELKGNMASYVQLNELLKSNGIQLKDEKQKIDVMEQIILWVTIFEDTKVLKDKLSQELGYLLNDKVINSVVGLRFAAWGRLSREFLENVLGRVRNDKLDVPVNIMTRLCKGEGNLMMLLSDAYTYSETVAKLNEQSSEVKKYDSISYDMVDELYVSPSVKRMIWQSLKVVDEIVNIMGGVQPKKIFVEMARGEEKKPERTVSRKKYLQDLYQNCRKQEPELAEQLDKVENSSLLNERLYLYYTQFGRCMYSGEAIDLEKLFDSYDVDHIYPRCYVKDDSLDNKVLVKRTLNGIKSKTYPLGAVADIAKNFDVCRPLWTKLRDKGLISNEKYKRLIRTTEFTQDELQSFVARQLVETRQSTKEVCNLLKQVYKDSRVVYSKAGNVSDFRHKFSFIKVRELNCLHHAKDAYLNIVVGNVFDEKFCHGDIRKFFSICSHTEEGYTFREGDTDVFSKPGDRLKKLGVWSGLDQIGAIRKQYRQNDIFVTELQEIRTGQFFDMNLSPKEAGLIPPKDIRVQPKNELLSGEILPKTGLDTSKYGGYKGASTSYFAFIEYTEKNKVVRSFAAVPVYINSMKGNLKDNIKDYFAKNGYASPKVLISQLKMPFFLRDNETSLTFKVYGVSGSSLSCGLVEQLTLSEKDTAQLKKVVSFLKKLKEDNSYQYSPKFAGFSDSELNELLNILKWKIINTKFKNISDSVTKLLKATQFDENLVLSIPDKAKLVMNLVGFFENRDHFNDLSLIGGKKQMGRLLKSIKPKGDFSIVYQSVTGFYVHEIKLNELK

SEQ ID NO: 26 - protein, 1356 aa, synthetic construct
  REGION 1..1356: note = MG44-26 effector
MEKEQKFYLGLDIGTNSVGIACTDENYNLLRVKGKDCWAVRLFDEAQTAADRRTARTARRRLQRRRYRINQLQGLFAPFMQDNLFFLRLNNSQFFADDKAGELDGDVNNLFADSGFTDRNFHEKYPTIYHLRFALQQSPVDDIRLYYLALHHIIKYRGHFLYDGNVSEVRDVHKLFDALNTVCENTFAENTPHFDIEKADEAKDMLLRSKGKLKDTVKSIKQLFSVQNDDCGKIRTEIINGFCGAKFSPEKLLGDAYSEEKSFAFRDIEEDAFEAMQSTYGDDFALLKAMREIYNFVTFERLFNGQPNISSAMIAVYDKHKSDLKKLKGFIKKNYDTDGGKKCREMFSDVTQKANYVNYVGHVGYGKSRKRVKTCDYDSFIAYVKKFLMDGNFAHDETYDEIMAEIEAKTFLPKILHSDNGLVPHQVNEDELVKIVAQMVRAFPETAQMASKILPLFLFRIPYYVGPLVGSNSWAVRKSDEKITPWNFRDVVDEAASNEEFMRRMTNKCTYLHGVDVLPKCSIAYQKFNTLNQINKLKVNDCAISVPLKQKIFAELFLVKPRVSDKMIASLIVREGAVAPGDSVVLSGKDGGDIRASMSSYIQLKRILGDFVDYDLASGGNVCENIILWHTLNTDKRLVEDLIVKNYGDNPAVAPYVKQLKGLVFNDFGKLSGRLLTELEVVDKQTGELCTVTDLLWNTNENFNELMFDKRYNLEEVIAAENEDDNDKVDYREVQKLYVSPAVRRGIWQSLQMVDEYVAALGKEPDKVFVEVSREDGVKGDKGRTHSRKKQLLEKYKNIDPKDVENIDELTGELNSDKISDMRLRQERLYLYFRQLGRCMYSGEPIDLDHINDSKLYDVDHILPRSYIKDDSLDNKVLVLRSKNAEKSDTYPLPLGFTNQQGWWKMLRAKDLISSGTYDRLMRTAPLTDDDYNDFINRQKVITDQTSKAVIELLKRKYPGATLVYSKAVNVADFKSKFDLYKCRETNDLHHARDAYLNVVVGNVYSTVFGVRIETYVKDGEKWKTYNLKKMFTRDVPGAWNENSIRTVKGVYNSSSMCVTRYAYCNKGAFYKQTIYSGAENVTAPRKGKGPLANMERYGGYMTQSTAYFAIVESQGKKGRIKTIEAVPVMVDYQSRNDPDRVVKYFEENGLVDVKLIVPKIKIRQLVSYNGSWVYLASITGNRIGVYNATELFTSNKIDMYVKQFVKLLEMAKNPTFDVSCEKYELTPNRERGEKIIIDRDSNVKLYDFLLKKFDSEGDAKNKINKRFQGISSYLAFGQNLKSGREKFVSLTVLQQVNVLSQVMKFFRCNADTADIELIGGSKGSGKILFNQNITDVDFRIISQSPCGLTVHVKRV

SEQ ID NO: 27 - protein, 1399 aa, synthetic construct
  REGION 1..1399: note = MG44-27 effector
MSYITLYNKAKQNKRGGDGKKNALPKRKSGSHTAKSGQTKFLFELALLFCKYILTHKKIKVKGKTTMEKFYLGMDIGTNSVGMACTDENYKLLRAKGKDCWSVRLFDESKTALERRTYRTSRRRLQRRKYRLALLQELFAPFIDDKNFFIRLNNSQFLPEDKDGALFGDKNNLFNDPALDDKTFHGQFPTIYHLRKALLDGGDYDLRLYYLALHHIIKYRGHFLFEGSMNDIRNINRLFTALNDTLKNVYGDDEAPEFAAISAEKAKEILLDPKKNIRDKEQELEKLFGAESKLEKEIIKGMCGAKISPSVLFGESFKEEKSFSFKELTDESFDAMRQTYGDNFALSEALRAIYSFVTFEKLLVGKPDISSAMIAVYEKHKSDLKLLKDFLRAESGEIYGKVFKNTNEKANYVNYVGYTKKGGDKKKVKTCGYEEFRQYLKKTIAAIDAKDKETQNLILSELENGSFLPKILHSDNGLFPHQVNEDELVKIADNMAKNHPETTDMAKKLRKLFLFRVPYFVGPLAGENSWAVRKTDEKVTPWNFDDVIDKAASNEEFMRRMTNHCSILHAEDVLPKCSMIYQKYNVLNQLNKLKINGCPLPSVELKQKIFNELFLKYNKVSDKKIIDLLVRSGEVSPEEARAITLTGKDGELNASMSSYITFKNILGDFADKPENAEILEKIILWHTLNTDKKIVEDLILKHFGKIPEIKNNVKTLKGLVFKDFGRLSEKLLTGLKAADRETGELLSIIDILYETNQNLNEILANERYNFAELIKAENGEESDEIGYKDIEELYISPAVRRGIWQSLIMADEYINAVGKVPDRIFIKFTRTDETKGEAGKKLSRKKQLSDKFKAIKDAEFQDIIAELNSDEITDMKLRQERLYLYFRQLGKCMYSGKNIDLSSLNTDTYDVDHILPRSYTKDDSLDNKALVLRDCNAKKADHYPVPSDLRQVKLWKLLHEKELISKKTFDRLMRTEPLGEGDYEDFINRQKVITDQTAKAVAELLQRKYPTSQIVYSKAKNVVDFKNKFGLYKCRETNNLHHARDAYLNIVVGNVYHTCFSTPMAMFYKKDDGWRENNLKTMFTRNVKGAWDENSLQLVQSTFKKHTMAVSQYAFCYNGMFYDQTVYPKGDPGITAPRKGNGALADVEKYGGYKSQKTSYFAIVQSKGKKGQTIKTIEAVPVLTAYRQRTNPDALLDYFKTYLTEPTILIPKLKVRQLVSYNGTPVYIAGVTDNQIGVNNATELFTDNKTDEYVNQLSKLVEMAKNGIISEENGEYIIKTNRNKDVKLTINRQSNIELYDTLKDRLSKPIYQGLSPFSTFRKNLESGEEKFANLSVTDQCTVLLQILKFFKCNADTADISLIGGGETCGRIRFNKDISKVNFEIVCKSPAGLTERIKKV

SEQ ID NO: 28 - protein, 1477 aa, synthetic construct
  REGION 1..1477: note = MG44-28 effector
MFRTIGFRFSGTAVSPHKNIHLSECLDDVVTKEPSDVVTKEPSDVVSQKDGYYVGLDIGTGSCGWAVTDLKYQVLKKSKKRLWGVRLFPTADTAAERRTFRCTRRRLQRRNWRLNLLKGLFEAEINKVDPAFFMRMKESMLQDDDRTTTARNALFADENYKDKNYAEEYPTIYHLRLNLMEKAPKDIRLLYLAIHHILKHRGHFLFENFNVDNISGSFETIWRNVSNIIVEKVFLTPDLESESIDDDGDDGDLNNNAIERLQSYGQEVLQQLLSLNRNRTDVKKRLSSIFEEALGEKADKKKKKSIEQCVAALVGAKFKPFVCVSDDEPEEEQLKIELCFSSASYETDFATKLGSTQQSVFAILKEVYDFVRLQNLLGGRKSISEAKVEMYKEHSKDLIVLKDLIRNSDHLQDNEKTSLYNNVFKKYDAPLKCVGECLYETILRYRALEIKSTTNKDLAPAKALYGQLMEIAQKFIEMNAAGAVIEPEILKVCNRIVDGTIFSHAVSVENSVIPQQLHAFELKKILENAKAQFPFLNESDEFGTVVDKIIKLHSFRIPYYVGPVNNYVGELNNSGNKHAWCVKNEGVNLPYTPWTFHKIVDTKKSAQEFINRMTSKCTYLRYADVLPKCSILYSEFEVLQELNNIRFNGCKLKHEQISLLIEELYKKDKNVTLKKLKNLLVSRMGFSREDVEVVSGIDLELKGNMASYVQLNELLKSNGIQLKDEKQKIDVMEQIILWVTIFEDTKVLKDKLSQELGYLLNDKVINSVVGLRFAAWGRLSREFLENVLGRVRNDKLDVPVNIMTRLRKGEGNLMMLLSDAYTYSETVAKLNEQSSEVKKYDSISYDMVDELYVSPSVKRMIWQSLKVVDEIVNIMGGVQPKKIFVEMARGEEKKPERTVSRKKYLQDLYQNCRKQEPELAEQLDKVENSSLLNERLYLYYTQFGRCMYSGEAIDLEKLFDSYDVDHIYPRCYVKDDSLDNKVLVKRTLNGIKSKTYPLGAVADIAKNFDVSRPLWTKLRDKGLISNEKYKRLIRTTEFTQDELQSFVARQLVETRQSTKEVCNLLKQVYKDSRVVYSKAGNVSDFRHKFSFIKVRELNCLHHAKDAYLNIVVGNVFDEKFCHGDIRKFFSICSHTEEGYTFREGDTDVFSKPGDRLKKLGVWSGLDQIGAIRKQYRQNDIFVTELQEIRTGQFFDMNLSPKEAGLIPPKDIRVQPKNELLSGEILPKTGLDTSKYGGYKGASTSYFAFIEYTEKNKVVRSFAAVPVYINSMKGNLKDNIKDYFAKNGYASPKVLISQLKMPFFLRDNKTSLTFKVSGVTGSRLSCGLAEQLTLSEKDTSQLKKVVSFLKKLQEDNSYQYSPKFAGFSDSELNELLNILKWKITNTKFKNISEPVTKLLEATQFDENLVLSIPDKAKLVMNLVGIFENRDHTNDLSLIGGKKEMGRLLKSIKPKGDFSIVYQSVTGFYVHEIKLNELK

SEQ ID NO: 29 - protein, 1059 aa, synthetic construct
  REGION 1..1059: note = MG44-29 effector
MVALYNKHKADLKKLKDFIKTNGTNELYYKFFKSTEEKNNYVNYVGYTRKVGDKKKVEKCKEEEFFAYTKKFLIENFGKLCETENEQGKILKEMLASIESKSFLPKILHADKGLMPRQLNQAELNKIVENMQKRMPETKEIAEKIEKLFLYKIPYYVGPLSYAGTIKDKNGVASGHWAVRNIGKENEKITPWNFDEVINKAASNREFMRRMTNKCTYLRGEDVLPKRSIIYQKFDVLNQLNKLRVNDKPISVELKNKIYNNLFLTKKKVTDKGIKDLLVREGIISEKERGQTELTGKDGEFKANMSSYITFCELFGKEFVDSDLEKSDSVCENIILWHTLNEDKKLVEQLILENYGKIPQIKSNIKVLKGLSFKEFGRLSKRFLTGIAIADKKTGEYVGGVLDVLENTNLNLNELLFDEKYSLAKTLAEENGETDSAVTFDDVNELYVSPAVKRGVWQAIKMADEYVSVLGRVPNKIFVEVTRENDPKKKGVRTFSRKDELLKKYRAMKNAEDYKDVIDALSGNETYDDMKLRSEKLFLYFCQLGRCAYTGERIDLSLLNSAYDVDHILPRTYIKDDSLDNKVLVKREKNATKDDDYPLPQGFTDQRPLWEFLKNAGLMSKTKFDRLTRVEPLNDDDYNYFINRQKVITDQTAKAVAELLQRKYPNSKIVYSKAGNVSDFRDKFSLFKCRETNDLHHARDAYLNVVVGNVYDVCFPSYINTMRKQEDEWRRRNLKNLFLRNREGAWVKDDDLSITSVKNTYGKHTMAVTRMATVGKGGFYNQTVYKKGDAGISVGRKGEGILADFEKYGGYSGLSTAYFAVVGSLDKKGNLKKTIEAVPVLIEYKAKNDENAVINYFSEYIDSPKIIVPQIKTKQLIRYNGTPFYIAGGSRYDARILAYNASQLFTDNKTDEYFKAVKKLLDMNKTVKQKTESEEFVMKTNNDGVRKLVITRQSNIEKYEMLVAQLDKDFYQGIPPFRNVKKIIDEGKKKFCELLVIDQCYVLMQILSYLQCKGATADLQLIGGSGRSGQIRFNKDITNVDFRIYDTSPTGLFVKESKA

SEQ ID NO: 30 - protein, 1333 aa, synthetic construct
  REGION 1..1333: note = MG44-30 effector
MGKFYLGMDIGTNSVGMACTDENYKLLRAKGKDCWSVRLFDESKTALERRTYRTSRRRLQRRKYRLALLQELFAPFIDDKNFFIRLNNSQFLPEDKDGALFGDKNNLFNDPALDDKTFHGQFPTIYHLRKALIDGGDYDLRLYYLALHHIIKYRGHFLFEGSMNDIRNINRLFTALNDTLKNVYGDDEAPEFAATSAEKAKEILLDPKKNIRDKEQELEKLFGAESKLEKEIIKGMCGAKISPSVLFGESFKEEKSFSFKELTDETFDAMRQTYGDNFALPEALRAIYSFVTFEKLLVGKPDISSAMIAVYEKHKSDLKLLKDFLRAESGEIYGKVFKNTNEKANYVNYVGYTKKGGDKKKVKTCGYEEFRQYLKKTIAAIDAKDKETQNLILSELENGSFLPKILHSDNGLFPHQVNEDELVKIADNMAKNHPETTDMAKKLRKLFLFRVPYFVGPLAGENSWAVRKTDEKVTPWNFDDVIDKAASNEEFMRRMTNHCSILHAEDVLPKCSMIYQKYNVLNQLNKLKINDCPLPSVELKQKIFNELFLKYNKVSDKKIIDLLIRSGEVSPEEARAITLTGKDGELNASMSSYITFKNILGDFADKPENAEILEKIILWHTLNTDKKIVEDLILNHFGKIPEIKNNIKALKGLVFKDFGRLSEKLLTGLKAADKETGELLSIIDILYETNQNLNEILANERYNFAELIKAENGEESDEIDYKDIEELYVSPAVRRGIWQSLIMADEYINAVGKVPDRIFIEFTRTDETKGEAGKKLSRKKHLSDKFKAIKDAEFQDIIAELNSDEITDMKLRQERLYLYFRQLGKCMYSGKNIDLSLLNTDTYDVDHILPRSYTKDDSLDNKVLVCRTCNAKKTDIYPVPAEFSQVKLWKLLHEKELISKKTFDRLMRTEPLGEGDYEDFINRQKVITDQTAKAVAELLQKKYPTSQIVYSKAKNVVDFKNKFGLYKCRETNNLHHARDAYLNIVVGNVYHTCFSTPMAMFYKKDDGWRENNLKTMFTRNVKGAWDENSLQLVKSTFKKHTMAVSQYAFCYNGMFYDQTVYPKGDPGITAPRKGSGALADVEKYGGYKSQKTSYFAIVQSKGKKGQTIKTIEAVPVLTAYRQRTNPDALLDYFKTYLTEPTILIPKLKVRQLVSYNGTPVYIAGITGDYIIAHNANELFTDNKTDEYVNQLSKLVEMAKNGTISEENGEYIIKTNRNKDVKLTINKHSNIELYDTLKNKLSKPSYQGLSPFSTFRKNLEGGEEKFANLSVADQCTVLLQILKFFKCNAETADIVLIGGSGRSGCILFNKDVSKADIKIICKSPAGLTERIKKV

SEQ ID NO: 31 - protein, 1320 aa, synthetic construct
  REGION 1..1320: note = MG44-31 effector
MERLQNYAEEYPTIYHLRLNLMEKAPKDIRLLYLAIHHILKHRGHFLFENFNVDNISGSFETIWRNVSNIIVEKVFLNPDLESESIDDDGDDGDLNNNAIERLQSYGQEVLQQLLSLNRNRTDVKKRLLSIFEEALGEKADKNKKKSIEQCVAALVGAKFKPFVCVSDDEPEEEQLKIELCFGSANYETDFATKLGSTQQSVFAILKEVYDFVRLQNLLGGRKSISEAKVEMYKEHSKDLIVLKDLIRNSDHLQDNEKTFLYNNVFKKYDAPVKCVGECLYETILRYRALEIKSTTNTDLAPAKALYGQLMEIAQKFIEMNAAGAVIEPEILKVCNRIVDGTIFSHAVSVENSVIPQQLHAFELKKILENAKAQFPFLNESDEFGTVVDKIIKLHSFRIPYYVGPVNNYVGELNNSGNKHAWCVKNEGVNLPYTPWTFHKIVDTKKSAQEFINRMTSKCTYLRYADVLPKCSILYSEFEVLQELNNIRFNGCKLKHEQISLLIEELYKKDKNVTLKKLKNLLVSRMGFSREDVEVVSGIDLELKGNMASYVQLNELLKSNGIQLKDEKQKIDVMEQIILWVTIFEDTKVLKDKLSQELGYLLNDKVINSVVGLRFAAWGRLSREFLENVLGRVRNDKLDVPVNIMTRLRKGEGNLMMLLSDAYTYSETVAKLNEQSSEVKKYDSISYDMVDELYVSPSVKRMIWQSLKVVDEIVNIMGGVQPKKIFVEMARGEEKKPERTVSRKKYLQDLYQNCRKQEPELAEQLDKVENSSLLNERLYLYYTQFGRCMYSGEAIDLEKLFDSYDVDHIYPRCYVKDDSLDNKVLVKRTLNGIKSKTYPLGAVADIAKNFDVCRPLWTKLRDKGLISNEKYKRLIRTTEFTQDELQSFVARQLVETRQSTKEVCNLLKQVYKDSRVVYSKAGNVSDFRHKFSFIKVRELNCLHHAKDAYLNIVVGNVFDEKFCHGDIRKFFSICSHTEEGYTFREGDTDVFSKPGDRLKKLGVWSGLDQIGAIRKQYRQNDIFVTELQEIRSGQFFDMNLSPKEAGLIPPKDIRVQTKNELVSGEILPKTGLDTSKYGGYKGASTSYFAFIEYTEKNKVVRSFAAVPVYINSMKGNLKDNIKDYFAKNGYASPKVLISQLKMPFFLRDNKTSLTFKVSGVSGNSLLCGLAEQLTLSEKDTAQLKKVVSFLKKLQEDNSYQYSPKFAGFSDSELNELLNILKWKITNTKFKNISEPVTKLLLKITQFDENLVLSIPDKAKLVMNLVGIFENRDHTNDLSLIGGKKQMGRLKKSIKPKGDFSIVYQSVTGFYVHEIKLNELK

SEQ ID NO: 32 - protein, 1356 aa, synthetic construct
  REGION 1..1356: note = MG44-32 effector
MEKEQKFYLGLDIGTNSVGIACTDENYNLLRVKGKDCWAVRLFDEAQTAADRRAARTARRRLQRRRYRINQLQGLFAPFMQDNLFFLRLNNSQFFADDKAGELDGDVNNLFADSGFTDRNFHEKYPTIYHLRFALQQSPVDDIRLYYLALHHIIKYRGHFLYDGNVSEVRDVHKLFDALNTVCENTFAENTPHFDIEKADEAKDMLLRSKGKLKDTVKSIKQLFSVQNDDCGKIRTEIINGFCGAKFSPEKLLGDAYSEEKSFAFRDVEEDAFEAMQSTYGDDFALLKAMREIYNFVTFERLFNGQPNISSAMIAVYDKHKSDLKKLKGFIKKNYDSDGGKKCREMFSDVTQKANYVNYVGHVGYGKSRKCVKTCDYDSFIAYVKKFLMDGNFAHDETYDEIMAEIEAKTFLPKILHSDNGLVPHQVNEDELVKIVAQMVRAFPETAQMASKILPLFLFRIPYYVGPLVGSNSWAVRKSDEKITPWNFRDVVDEAASNEEFMHRMTNKCTYLHGVDVLPKCSIAYQKFNTLNQINKLKVNDCAISVPLKQKIFAELFLVKPRVSDKMIASLIVREGAVAPGDSVVLSGKDGGDIKASMSSYIQLKRILGDFVDYDLASGGNVCENIILWHTLNTDKRLVEDLIVKNYGDNPAVAPYVKQLKGLVFNDFGKLSGRLLTELGVVDKQTGELCTVTDLLWNTNENFNELMFDKRYNLEEVIAAENEDDNDKVDYREVQKLYVSPAVRRGIWQSLQMVDEYVAALGKEPDKVFVEVIREEGVKGDKGRTHSRKKQLLEKYKNIDPKDVENIDELTGELNSDKISDMRLRQERLYLYFRQLGRCMYSGEPIDLDHINDSKLYDVDHILPRSYIKDDSLDNKVLVLRSKNAEKSDTYPLPLGFTNQQGWWKMLRAKDLISSGTYDRLMRTAPLTDDDYNDFINRQKVITDQTSKAVIELLKRKYPGATLVYSKAVNVADFKSKFDLYKCRETNDLHHARDAYLNVVVGNVYSTVFGVRIETYVKDGEKWKTYNLKKMFTRDVPGAWNENSIRTVKGVYNSSSMCVTRYAYCNKGAFYKQTVYSGNENITAPRKGKGPLANMERYGGYMTQSTAYFAIVESQGKKGRIKTIEAVPVMVDYQSRNDPDRVVKYFEENGLVDVKLIVPKVKVRQLVSYNGSWVYLASITGNRIGVYNATELFTSNKIDMYVKQFVKLLEMAKNPMFDVNCEKYELTPNRERGEKITIDRDSNIKLYDFLLKKFDSEGDAKNKINKRFQGISSYLAFGQNLKSGREKFVSLTVLQQVNVLSQVMKFFRCNADTADIELIGGSKGSGKILFNQNITDVDFRIISQSPCGLTVHVKRV

SEQ ID NO: 33 - protein, 1455 aa, synthetic construct
  REGION 1..1455: note = MG44-33 effector
MINNLNLSECLDDVVTKEPSDVVSQKDGYYVGLDIGTGSCGWAVTDTKYQVLKKSKKRLWGVRLFPTANTAAERRTFRCNRRRLQRRNWRLNLLKGLFEAEINKVDPVFFMRMKESMLQDDDRTTTARNALFADENYKDKNYAEEYPTIYHLRLNLMEKAPKDIRLLYLAIHHILKHRGHFLFENFNVDNISGSFETIWRNVSNIIVEKVFLNPDLESESIDDDGDDGDLNNNAIERLQSYGQEVLQQLLSLNRNRTDVKKRLLSIFEEALGEKADKNKKKSIEQCVAALVGAKFKPFVCVSDDEPEEEQLKIELCFGSANYETDFATKLGSTQQSVFAILKEVYDFVRLQNLLGGRKSISEAKVEMYKEHSKDLIVLKDLIRNSDHLQDNEKTFLYNNVFKKYDAPVKCVGECLYETILRYRALEIKSTTNTDLAPAKALYGQLMEIAQKFIEMNAAGAVIEPEILKVCNRIVDGTIFSHAVSVENSVIPQQLHAFELKKILENAKAQFPFLNESDEFGTVVDKIIKLHSFRIPYYVGPVNNYVGELNNSGNKHAWCVKNEGVNLPYTPWTFHKIVDTKKSAQEFINRMTSKCTYLRYADVLPKCSILYSEFEVLQELNNIRFNGCKLKHEQISLLIEELYKKDKNVTLKKLKNLLVSRMGFSREDVEVVSGIDLELKGNMASYVQLNELLKSNGIQLKDEKQKIDVMEQIILWVTIFEDTKVLKDKLSQELGYLLNDKVINSVVGLRFAAWGRLSREFLENVLGRVRNDKLDVPVNIMTRLRKGEGNLMMLLSDAYTYSETVAKLNEQSSEVKKYDSISYDMVDELYVSPSVKRMIWQSLKVVDEIVNIMGGVQPKKIFVEMARGEREKPERTVSRKKYLQDLYQNCRKQEPELAEQLDKVENSSLLNERLYLYYTQFGRCMYSGEAIDLEKLFDSYDVDHIYPRCYVKDDSLDNKVLVKRTLNGIKSKTYPLGAVADIAKNFDVCRPLWTKLRDKGLISNEKYKRLIRTTEFTQDELQSFVARQLVETRQSTKEVCNLLKQVYKDSRVVYSKAGNVSDFRHKFSFIKVRELNCLHHAKDAYLNIVVGNVFDEKFCHGDIRKFFSICSHTEEGYTFREGDTDVFSKPGDRLKKLGVWSGLDQIGAIRKQYRQNDIFVTELQEIRSGQFFDMNLSPKEAGLIPPKDIRVQTKNELVSGEILPKTGLDTSKYGGYKGASTSYFAFIEYTEKNKVVRSFAAVPVYINSMKGNLKDNIKDYFAKNGYASPKVLISQLKMPFFLRDNKTSLTFKVSGVSGNSLLCGLAEQLTLSEKDTAQLKKVVSFLKKLQEDNSYQYSPKFAGFSDSELNELLNILKWKITNTKFKNISEPVTKLLLKITQFDENLVLSIPDKAKLVMNLVGIFENRDHTNDLSLIGGKKQMGRLKKSIKPKGDFSIVYQSVTGFYVHEIKLNELK

SEQ ID NO: 34 - protein, 1334 aa, synthetic construct
  REGION 1..1334: note = MG44-34 effector
MKKFYIGADIGTNSVGVACTDESYRLIRAKSKDCWAVRLFDEGETAFDRRTKRTARRRLARRKQRINWLQELFEPFIDDKTFFIRLNNSQYLPEDKDSLLCGNKNNLFENEGEESKFYKKYPTIYHLRKALMDGGNFDIRLYYLALHHIIKYRGHFLYEGSIEDIRDFSNLMKGLDCAIADSYDGGLNLFDSVDSAKVRDILIDKKSGLRDKQVELEKLLCAKSKREKEILKGITGQKISPYVLFGDEFKEEKSFSLNDMSDEEFESKRSSYGESFTLLDLMHSVCNYVKFEKIFEGHSDISSAMISVYEKHKADLVLLKKVVRKQSKEDYNKIFRSVNEEKNYVNYIGYTSKDGRKIKVKKCKDEDFFKYLKKYLNGILNEDNFDIVSKIIKEIDDRIFLPKILHSDNGLFPKQVNEFELKKIIENMVRNYAETEEMASAVLSLFNYKIPYYVGPLTGCNSWVVRTDEKVTPWNFDRVVDLAKSNEAFMRRMTNKCAYIKGEDVLPKASIIYQKYDTLNQLNKLRINDRVISIELKQTIYNELFLKYPKVTDKKIKELLVREGLCSSSETKDITISGKDGDFKSSMSSYIRLKNILGDFVDDDLKSGGKVCENIILWHTLNTDKKIVEDLIEKNYGFIPEIKANIKQLKGLTFNDFGRLSAKLLIGIEGVDKTTGQILTILDVLYQTNQNLNEVLNNESYNFSEIIDEENGIETEIISYETVEELYVSPAVRRGIWQTLLMIDEYVNAVGRQPDKIFIEVTRNDGKKGDNGRTQPRKRQLQEKFKNIGSAYSDIIEELSEEKYTDLKLRQERLYLYFRQLGRCMYTGERIILDELNGNRYDVDHILPRTYVKDDSLDNKVLVCRGANATKADTYPLPTEFSRKEVRAHWKMLLDKDLISKTTYDRLTRIEPLKDDDYNDFINRQKTITDQTAKAVIELLKRKYPNAKLIFSRAKNVNDFKNRFNLFKCRETNDLHHARDAYLNVVVGNVFDSVFSTPLGQSRKDGDVWRIYNLKKLFTRDVIGAWSKDSIKIVKDTYSKPSMSVTRYATCNKGKFYDETVCRKNDSAITAPRKGKGPLSDVTKYGGYTTQKTAYFAIVTSVDKKGKSIKTIEAIPVLVTYKLKTDTNAIQKYLESYLREPIIVIPKVKVKQLVSYNGSLCYLAGITNNQITVHNASQLYTDNTTDEYVNQLIKIIGMGDNGIITGNESQYITKTNKDGVIRIVVNKENNEKLYETLKNKLDSKIYKGLSAFASFKKNMERGKDKFCELSVLEQAKVLLQILKVFRCNAEISDIQAIGGTAHSGKKLFAKNITDVDFKLVNLSPAGLTVRIRKV

SEQ ID NO: 35 - protein, 1337 aa, synthetic construct
  REGION 1..1337: note = MG44-35 effector
MEKFYIGTDIGTNSAGVACTDENYNLLRVKGKDCWAVRLFDEGKTAVDRRTFRTGRRRLQRRKQRIAWLQDLFAPYMEDETFFIRLNNSQFLPEDKDALLGGDKNTLFAGVYDDKKFHTEFPTVYHLREALMRGGVNDLRLYYLALHHIVKYRGHFLTEGSVDDVRDFGRLLGNLNGVISDVYGDEVPLFSEAAVDEAKNVLLDKTLGIKDRSTELEKIFGVKDKTSKEIIKGLCGGKISPAVLFGDEYKEEKSFSFKEITDENFEGMRATYGDDFALLEGIRSVYGYVTFEKLLSDHTDLSSAMIAVYDKHKKDLLALKAFIRSERPEDYNKIFKSTDEKYNYVNYIGYTKKGRDKKKVKKCKDDEFYAYIKKYLQGLTDVKDVAARDEFLKDVEAGSFMPKILHSDNGLFPRQINEYELKKILENMVKSFPATAEIKDKIVTLFNYRIPYYVGPLAGKEETCWAVKKSNEKITPWNFDDVIDKAKSNEKFMLRMTNKCSYLRGEDVLPKASIIYQKFDTLNQLNKLRVNDELLTVDLKQKIFNELFLKYPKVSDKKIIDLLVREGKISQNDRSEVTLSGKDGEFKASMSSYIHLKNILGDFVDKDLSENGGVCENIILWHTLNTDKNIVVDLIKENYGKIPEIKNAIKQLKGLAFHDFGRLSRKLLCEIYTVKEDTGELWNVLDALYETNENLNELLNDEKFSFGRNIKEENGEMTSDVGYKDVEELYVSPAVRRGIWQTLTVVDEYVKAIGKAPDKIFVEVTREDGIKGDAGRTQSRKRRLQEKFRTVSDAYADVIAELGEERFTDLKLRQERLFLYFRQLGRCMYTGERIDLNSINDVTRYDVDHILPRTFIKDDSLDNKVLVLRSKNAKKSDTYPLPAGFSNQRDFWKMLLDKGLIAKVTYDRLTRTEPLREDEYQDFINRQKVITDQTVKVVAELFKRRYPTAKIVYSKAKNVNDFKQKFDLFKCRETNDLHHARDAYLNVVVGNVYDTVFTTPMSMYRKDGDVWRTYNLNKLFTRDVKGAWDNAQSIATVKKVYSKNSMVVTRYATCNNGGFYNATVYSKDEKGITAPRKGKGPLSDSSKYGGYMTQPTAYFAIVSSKDKNGNEIKTIEAVPVLTAYVAKNDPKAVEKYFTGRLKDAKIIVPKIKIKQLASYNGTLCCLAGTTDNRILVHNAVELFTDGKTDEYVNSLLKLADMKAKGIINVGQEEFVMKTNRDGERKLVIDRANNADLYDMLKRKLERENYAGLSAFATFRKNLEKGEEKFNSLTVYEQTVVLLQILKFFKCNAETADTTLVGGSAKSGSIKFNNNITNVDFRLIDLSPAGLTERVRKV

SEQ ID NO: 36 - protein, 1454 aa, synthetic construct
  REGION 1..1454: note = MG44-36 effector
MINNLNLSECLDDVVTKEPSDVVSQKDGYYVGLDIGTGSCGWAVTDLKYQVLKKSKKRLWGVRLFPTADTAAERRTFRCTRRRLQRRNWRLNLLKGLFEAEINKVDPAFFMRMKESMLQDDDRTTTARNALFADENYKDKNYAEEYPTIYHLRLNLMEKAPKDIRLLYLAIHHILKHRGHFLFENFNVDNISGSFETIWRNVSNIIVEKVFLTPDLESESIDDDGDDGDLNNNAIERLQSYGQEVLQQLLSLNRNRTDVKKRLSSIFEEALGEKADKKKKKSIEQCVAALVGAKFKPFVCVSDDEPEEEQLKIELCFSSASYETDFATKLGSTQQSVFAILKEVYDFVRLQNLLGGRKSISEAKVEMYKEHSKDLIVLKDLIRNSDHLQDNEKTSLYNNVFKKYDAPLKCVGECLYETILRYRALEIKSTTNKDLAPAKALYGQLMEIAQKFIEMNAAGAVIEPEILKVCNRIVDGTIFSHAVSVENSVIPQQLHAFELKKILENAKAQFPFLNESDEFGTVVDKIIKLHSFRIPYYVGPVNNYVGELNNSGNKHAWCVKNEGVNLPYTPWTFHKIVDTKKSAQEFINRMTSKCTYLRYADVLPKCSILYSEFEVLQELNNIRFNGRKLKHEQISLLIEELYKKDKNVSLKKLKNLLVSRMGFSREDVEVVSGIDMELKGNMASYVQLNELLKTNGIQLKDEKQKIDVMEQIVLWVTIFEDAKVLKDKLSQELGYLLNDKVINSVVGLRFAAWGRLSREFLENVLGRVRNDKLDIPVNIMTRLRKGEGNLMMLLSDAYTYSETVAKLNEQSSEVKKYDSISYDMVDELYVSPSVKRMIWQSLKVVDEIVNIMGGVQPKKIFVEMARGEEKKPERTVSRKKYLQDLYQNCRKQEPELAEQLDKVENSSLLNERLYLYYTQFGRCMYSGEAIDLEKLFDSYDVDHIYPRCYVKDDSLDNKVLVKRTLNGIKSKTYPLGAVADIAKNFDVCRPLWTKLRDKGLISNEKYKRLIRTTEFTQDELQSFVARQLVETRQSTKEVCNLLKQVYKDSRVVYSKAGNVSDFRHKFSFIKVRELNCLHHAKDAYLNIVVGNVFDEKFCHGDIRKFFSICSHNEEGYTFREGDTDVFSKPGDRLKKLGVWSGPEQIGAIRKQYRQNDIFVTELQEIRSGQFFDMNLSPKEAGLIPPKDIRVQTKNELVSGEILPKTGLDTSKYGGYKGASTSYFAFIEYTEKNKVVRSFAAVPVYINSMKGNLKDNIKDYLVKNGYASPKVLISQLKMPFFLRDNKTSLTFKVSGVSDGRLLCGLAEQLTLSEKDTAQLKKVVSFLKKLNEDNSYQYSPKFAGFSDSELNELLNILKWKITNTKFKNISDKVTSLLEATQFDENLVLSIPDKAKLVMNLVGIFENRDHSNDLSLIGGKKQMGRLLKSIKPNGDFSIVYQSVTGFYVHEIKLNELK

SEQ ID NO: 37 - protein, 1337 aa, synthetic construct
  REGION 1..1337: note = MG44-37 effector
MEKFYIGTDIGTNSAGVACTDENYNLLRVKGKDCWTVRLFDEGKTAVDRRTFRTGRRRLQRRKQRIAWLQDLFAPYMEDETFFIRLNNSQFLPEDKDALLGGDKNTLFAGVYDDKKFHTEFPTVYHLREALMRGGINDLRLYYLALHHIVKYRGHFLTEGSVDDVRDFGRLLGELNEGDSRVYGDDFPTFSEAAVDEAKNVLLDKTLGIKDRSFKLEKIFGVSDKTSKEIIKGMCGGKISPAVLFGDEYKEEKSFSFKEITDDNFESMRGTYGDNFTVLEVIRSIYGYVIIENLLSGHDDLSSAMIAVYDKHKDDLLALKAFIRSERPEDYNKIFKSTDEKSNYVNYIGYTKKGGDKKKVKKCKDDEFYAYIKKYLQGLTDIKDVAARDTFLKDIEDGSFMPKILHSDNGLFPRQINEVELKKILENMVKSFPATAEIKDKIVTLFNYKIPYYVGPLAGKEETCWAVKKSNEKITPWNFDDVIDKAKSNEKFMLRMTNKCSYLRGEDVLPKASIIYQKFDTLNQLNKLRVNDELLTVDLKQKIFNELFLKYPKVSDKKIIDLLVREGEISQNDRSEVTLSGKDGEFKASMSSYIHLKNILGDFVDKDLSENGGVCENIILWHTLNTDKNIVVDLIKENYGKIPEIKNAIKQLKGLVFHDFGRLSRKLLCEIYTVKEDTGELWNVLDALYETNENLNELLNDEKFSFGRNIKEENGEMTSDVGYKDVEELYVSPAVRRGIWQTLTVVDEYVKAIGKAPDKIFVEVTREDGIKGDAGRTQSRKRRLQEKFRTVSDAYADVIAELGEERFTDLKLRQERLFLYFRQLGRCMYTGERIDLNNINDVTRYDVDHILPRTFIKDDSLDNKVLVLRSKNAKKSDTYPLPAGFSNQRDFWKMLLDKGLIAKVTYDRLTRTEPLREDEYQDFINRQKVITDQTVKVVAELFKRRYPTAKIVYSKAKNVNDFKQKFDLFKCRETNDLHHARDAYLNVVVGNVYDTVFTTPMSMYRKDGDVWRTYNLNKLFTRDVKGAWDNAQSIATVKKVYSKNSMVVTRYATCNNGGFYNATVYSKDEKGITAPRKGKGPLSDSSKYGGYMTQPTAYFAIVSSKDKNGNEIKTIEAVPVLTAYVAKNDPKAVEKYFTGRLKDAKIIVPKIKIKQLASYNGTLCCLAGTTDNRILVHNAVELFTDGKTDEYVNSLLKLADMKAKGIINVGQEEFVMKTNRDGERKLVIDRANNADLYDMLKRKLERENYAGLSAFATFRKNLEKGEEKFNSLTVYEQTVVLLQILKFFKCNAETADTTLVGGSAKSGSIKFNNNITNVDFRLIDLSPAGLTERVRKV

SEQ ID NO: 38 - protein, 1337 aa, synthetic construct
  REGION 1..1337: note = MG44-38 effector
MEKFYIGTDIGTNSAGVACTDENYNLLRVKGKDCWTVRLFDEGKTAVDRRTFRTGRRRLQRRKQRIAWLQDLFAPYMEDETFFIRLNNSQFLPEDKDALLGGDKNTLFAGVYDDKKFHTEFPTVYHLREALMRGGINDLRLYYLALHHIVKYRGHFLTEGSVDDVRDFGRLLGELNEGDSRVYGDDFPTFSEAAVDEAKNVLLDKTLGIKDRSFKLEKIFGVSDKTSKEIIKGMCGGKISPAVLFGDEYKEEKSFSFKEITDDNFESMRGTYGDNFTVLEVIRSIYGYVIIENLLSGHDDLSSAMIAVYDKHKDDLLALKAFIRSERPEDYNKIFKSTDEKSNYVNYIGYTKKGGDKKKVKKCKDDEFYAYIKKYLQGLTDIKDVAARDTFLKDIEDGSFMPKILHSDNGLFPRQINEVELKKILENMVKSFPATAEIKDKIVTLFNYKIPYYVGPLAGKEETCWAVKKSNEKITPWNFDDVIDKAKSNEKFMLRMTNKCSYLRGEDVLPKASIIYQKFDTLNQLNKLRVNDELLTVDLKQKIFNELFLKYPKVSDKKIIDLLVREGEISQNDRSEVTLSGKDGEFKASMSSYIHLKNILGDFVDKDLSENGGVCENIILWHTLNTDKNIVVDLIKENYGKIPEIKNAIKQLKGLVFHDFGRLSRKLLCEIYTVKEDTGELWNVLDALYETNENLNELLNDEKFSFGRNIKEENGEMTSDVGYKDVEELYVSPAVRRGIWQTLTVVDEYVKAIGKAPDKIFVEVTREDGIKGDAGRTQSRKRRLQEKFRTVSDAYADVIAELGEERFTDLKLRQERLFLYFRQLGRCMYTGERIDLNNINDVTRYDVDHILPRTFIKDDSLDNKVLVLRSKNAKKSDTYPLPAGFSNQRDFWKMLLDKGLIAKVTYDRLTRTEPLREDEYQDFINRQKVITDQTVKVVAELFKRRYPTAKIVYSKAKNVNDFKQKFDLFKCRETNDLHHARDAYLNVVVGNVYDTVFTTPMSMYRKDGDVWRTYNLNKLFTRDVKGAWDNAQSIATVKKVYSKNSMVVTRYATCNNGGFYNATVYSKDEKGITAPRKGKGPLSDSSKYGRYMTQPTAYFAIVSSKDKNGNEIKTIEAVPVLTAYVAKNDPKAVEKYFTGRLKDAKIIVPKIKIKQLASYNGTLCCLAGTTDNRILVHNAVELFTDGKTDEYVNSLLKLADMKAKGIINVGQEEFVMKTNRDGERKLVIDRANNADLYDMLKRKLERENYAGLSAFATFRKNLEKGEEKFNSLTVYEQTVVLLQILKFFKCNAETADTTLVGGSAKSGSIKFNNNITNVDFRLIDLSPAGLTERVRKV

SEQ ID NO: 39 - protein, 1333 aa, synthetic construct
  REGION 1..1333: note = MG44-39 effector
MEKFYLGMDIGTNSVGMACTDENYKLLRAKGKDCWSVRLFDESKTALERRTYRTSRRRLQRRKYRLALLQELFAPFIDDKNFFIRLNNSQFLSEDKDGALFGDKNNLFNDPALDDKTFHGQFPTIYHLRKALIDGGDYDLRLYYLALHHIIKYRGHFLFEGSMNDIRNINRLFTALNDTLKNVYGDDEAPEFAATSAEKAKEILLDPKKNIRDKEQELEKLFGAESKLEKEIIKGMCGAKISPSVLFGESFKEEKSFSFKELTDETFDAMRQTYGDNFALPEALRAIYSFVTFEKLLVGKPDISSAMIAVYEKHKSDLKLLKDFLRAESGEIYGKVFKNTDEKANYVNYVGYTKKGGDKKKVKTCGYEEFRQYLKKTIAAIDAKDKETQNLILSELENGSFLPKILHSDNGLFPHQVNEDELVKIADNMAKNHPETTDMAKKLRKLFLFRVPYFVGPLAGENSWAVRKTDEKVTPWNFDDVIDKAASNEEFMRRMTNHCSILHAEDVLPKCSMIYQKYNVLNQLNKLKINDCPLPSVELKQKIFNELFLKYNKVSDKKIIDLLVRSGEVSPEEARAITLTGKDGELNASMSSYITFKNILGDFADKPENAEILGKIILWHTLNTDKKIVEDLILKHFGKIPEIKNNVKALKGLVFKNFGRLSEKLLTGLKAADKETGELLSITDILYETNQNLNEILANERYNFAELIKAENGEESDEIGYKDIEELYVSPAVRRGIWQSLIMADEYINAVGKVPDRIFIEFTRTDETKGEAGKKLSRKKQLSDKFKAIKDAEFQDIIAELNSDEITDMKLRQERLYLYFRQLGKCMYSGKNIDLSLLNTDTYDVDHILPRSYTKDDSLDNKVLVCRTCNAKKTDIYPVPAEFRQVKLWKLLHEKELISKKTFDRLMRTEPLGEGDYEDFINRQKVITDQTAKAVAELLQKKYPTSQIVYSKAKNVVDFKNKFDLYKCRETNNLHHARDAYLNIVVGNVYHTCFSTPMAMFYKKDDGWRENNLKTMFTRNVKGAWDENSLQLVKSTFEKHTMAVSQYAFCYNGMFYDQTVYPKGDPGITAPRKGNGALADVEKYGGYKSQKTSYFAIVQSKGKKGQTIKTIEAVPVLTAYRQRTNPDALLDYFKTYLTEPTILIPKLKVRQLVSYNGTPVYIAGITGDYIIAHNANELFTDNKTDEYINQLSKLVEMAKNGTISEENGEYIIKTNRNKDVKLTINKHSNIELYDTLKNKLSKPSYQGLSPFSTFRKNLEGGEEKFANLSVADQCTVLLQILKFFKCNAETADIVLIGGSGRSGCILFNKDVSKADIKIICKSPAGLTERIKKV

SEQ ID NO: 40 - protein, 1455 aa, synthetic construct
  REGION 1..1455: note = MG44-40 effector
MINNLNLSECLDDVVTKEPSDVVSQKDGYYVGLDIGTGSCGWAVTDLKYQVLKKSKKRLWGVRLFPTADTAAERRTFRCTRRRLQRRNWRLNLLKGLFEAEINKVDPAFFMRMKESMLQDDDRTTTARNALFADENYKDKNYAEEYPTIYHLRLNLMEKAPKDIRLLYLAIHHILKHRGHFLFENFNVDNISGSFETIWRNVSNIIVEKVFSNPDLESEPIDDDGDDGDLNNNAIERLQSHGQEVLQQLLSLNRNRTDVKKRLLSIFEEALGEKADKKKKKSIEQCVAALVGAKFKPFVCVSDDEPEEEQLKIELCFGSANYETDFATKLGSTQQSVFAILKEVYDFVRLQNLLGGRKSISEAKVEMYKEHSKDLIVLKDLIRNSDHLQDNEKTFLYNNVFKKYDAPVKCVGECLYETILRYRALEIKSTTNKDLAPAKALYGQLMEIAQKFIEMNAAGAVIEPDILKVCNRIVDGTIFSHAVSVENSVIPQQLHAFELKKILENAKAQFPFLNESDEFGTVVDKIIKLHSFRIPYYVGPVNNYVGELNNSGNKHAWCVKNEGVNLPYTPWTFHKIVDTKKSAQEFINRMTSKCTYLRYADVLPKCSILYSEFEVLQELNNIRFNGCKLKHEQISLLIEELYKKDKNVTLKKLKNLLVSRMGFSREDVEVVSGIDLELKGNMASYVQLNELLKSNGIQLKDEKQKIDVMEPIILWVTIFEDTKVLKDKLSQELGYLLNDKVINSVVGLRFAAWGRLSREFLENVLGRVRNDKLDVPVNIMTRLRKGEGNLMMLLSDAYTYSETVAKLNEQSSEVKKYDSISYDMVDELYVSPSVKRMIWQSLKVVDEIVNIMGGVQPKKIFVEMARGEEKKPERTVSRKKYLQDLYQNCRKQEPELAEQLDKVENSSLLNERLYLYYTQFGRCMYSGEAIDLEKLFDSYDVDHIYPRCYVKDDSLDNKVLVKRTLNGIKSKTYPLGAVADIAKNFDVCRPLWTKLRDKGLISNEKYKRLIRTTEFTQDELQSFVARQLVETRQSTKEVCNLLKQVYKDSRVVYSKAGNVSDFRHKFSFIKVRELNCLHHAKDAYLNIVVGNVFDEKFCHGDIRKFFSICSHTEEGYTFREGDTDVFSKPGDRLKKLGVWSGLDQIGAIRKQYRQNDIFVTELQEIRSGQFFDMNLSPKEAGLIPPKDIRVQTKNELVSGEILPKTGLDTSKYGGYKGASTSYFAFIEYTEKNKVVRSFAAVPVYINSMKGNLKDNIKDYFAKNGYASPKVLISQLKMPFFLRDNKTSLTFKVSGVSGNSLLCGLAEQLTLSEKDTAQLKKVVSFLKKLQEDNSYQYSPKFAGFSDSELNELLNILKWKITNTKFKNISEPVTKLLLKITQFDENLVLSIPDKAKLVMNLVGIFENRDHTNDLSLIGGKKQMGRLKKSIKPKGDFSIVYQSVTGFYVHEIKLNELK

SEQ ID NO: 41 - protein, 1420 aa, synthetic construct
  REGION 1..1420: note = MG44-41 effector
MSNYNNFKKYGDYYIGLDVGTGSCGWAVTDTSYNILKVSGKSLWGVRLFPTADTAAERRSHRCARRRVFRNRQRLNLLEQLFDSEISKVDVGFFQRLKNSEFKEISKNNLFGDCTYNDKDFFKEYPTIYHLRYKLMNEPIDDIRLLFLAVHHIIKHRGHFLFENVNNIGASLPELWEQCCSQFVDISLFSNLSEDYLDIAESLKQTLIDMRDDVINVIKTSSDKKADLNKVFAQLKSVYDEISDYEVKKTIENRVNKWSSLLLGYKVSAVEIFSIDESDEEGSSCKIQINSSDYDEQLLKIKDEFKGVVESEKAVYDVIKLQEILKGCKSISEAKVKLYNKHAEELRIFKNLLRERLSEKILIEVNKNVKVANNEKLTSDPKSFYKEIFEERNKNTEKGKICFYYDITHGDKSANKEAIKGSSIYKRLQILAQILLCSSEIYKLSEKEKVLLHRIGDLSIFETQVSADNSVIPYQINLAELDKILKVQSKNFAFLSEKDDAGVLVYDKIKALLTFRIPYYVGPLNNHSKFSWIVKKSQEKIVPWNFESVVDTEKSAEAFIKRMTSKCTYLSGEDVLPKNSIIYSKFMVLNVLNNIRINGMRLDEAQTGLTKKVFDELYCNQINVTQKQLVAYLYNNGFLTSKEELTGFDDEQKVSMSSYVKIKNALGTDNFDINFAESFIKYSTLFPNDYLMIEKRLKREFSSECAKFNENLSKLCRIKFSGWGRLSEKLLTGLLGHNKNSEFDKNSILGFMLNGKGNLMELLSSEYTFSDLISSENSTLDKNDAFSYQNLVEGLYVSPSVKRMIWQTLLVVREITKKIMGYEPSRIFVEMARGATADQKGKRTNSRKKSILALYDKCRQDFDISDLSSKLENEKDSKLLSDKIYLYYTQLGKSVYTGKEIKIDEFDLYDIDHIIPQSLTKDDSLDNRVLVEKEINQNDKKNRYPLSSEIQENQKQFWKHLLDLGLISKSKFERLIRSTPLSNSEKEEFIARQLVETRQSTKAIAGLLSKLYKTAKIIYPKAGLTADFKQRFDLIKVRELNDLHHAKDAYCNIIVGNVYYEKFTSNYLYVIENNEPYSFSTSDKSYIFTKQNEKRLQETGTWDSRNGKSISIVKKYYKRNNILMTYKQEERIGALFNQTLYGPEKGTIPKKKNMSCQDYGGYDSDQNSFFSFISYKDDKANLKTKLIGIPLRVVYGLSDKASAISHYLLTEKANEYREPKVLIDFLPFNFILKDNETGFLARVVSFASKGKQLEIKQFNPLVLDEKNLKPLKAIEKFVSRLKNKSIKIKYEKDKSGFTDEDLSSIYSELKDKSKNSVFKNLPKPIVKMLSDVDINNYKYQESEKSEPKLLTIEQKAVAICELIKAFHTESSNLLFLGEKKGSGVKRIKTVLDLEKTDYSILCSSITGFYEKEIRLRDLLK

SEQ ID NO: 42 - protein, 1334 aa, synthetic construct
  REGION 1..1334: note = MG44-42 effector
MKKFYIGADIGTNSVGVACTDESYRLIRAKSKDCWAVRLFDDGETAADRRTKRTARRRLARRKQRINWLQELFAPFIDDKTFFIRLNNSQYLPEDKDSLLCGNKNNLFENEGGESKFYKKYPTIYHLRKALMDGGNFDIRLYYLALHHIIKYRGHFLYEGSIEDILDFSNLMKGLKCAISDSYDGELNLFDSVDSAKVRDVLIDKKSGLRDKQVELEKLLCAKSKREKEILKGITGQKISPYVLFGDEFKEEKSFSLNDMSDEEFESKRSSYGESFTLLDLMHSVCNYVKFEKIFEGHSDISSAMISVYEKHKTDLVLLKKVVRKQSKEDYNKIFRSVNEKENYVNYIGYTSKDGRKIKVKKCKDEDFFKYLKKYLNGILNEDNFDIVSKIIKEIDDRIFLPKILHSDNGLFPKQVNEFELKKIIENMVRNYPETEEMASAVLSLFNYKIPYYVGPLTGCNSWVVRTDEKVTPWNFDRVVDLAKSNEAFMRRMTNKCSYIKGEDVLPKASIIYQKYDTLNQLNKLRINDRVISVELKQTIYNELFLKYPKVTDKKIKELLVREGLCSSSETKDITISGKDGDFKSSMSSYIRLKKILGDFVDDDLKSGGKVCENIILWHTLNTDKKIVEDLIEKNYGFIPEIKANIKQLKGLTFNDFGRLSTKLLIGIEGVDKTTGQILTILDVLYQTNQNLNEVLNNESYNFSEIIDEENGIETEIVSYETVEELYVSPAVRRGIWQTLLMIDEYVNAVGRQPDKIFIEVTRNDGKKGDNGRTQPRKRQLQEKFKNIGSAYSDIIEELSEEKYTDLKLRQERLYLYFRQLGRCMYTGERIILDELNGNRYDVDHILPRTYVKDDSLDNKVLVCRGANATKADTYPLPAEFSKKEVRAHWKMLLDKDLISKTTYDRLTRIEPLKEDDYNDFINRQKTITDQTSKAVIELLKRKYPDAKLIFSRAKNVSDFKNRFNLFKCRETNDLHHARDAYLNVVVGNVFDTVFSTPLGQSRKDGDVWRIYNLKKLFTRDVIGAWSKDSIKIVKDTYSKPSMSVTRYATCNKGKFYDETVCRKDDSAITAPRKGEGPLSDVTKYGGYTSQKTAYFAIVTSVDKKGKRIKTIEAIPVLVTYKLKTDTNAIQKYLESYLREPVIVIPKVKVKQLVSYNGSLCYLAGITGNQITVHNASQLYTDNDTDEYVNELIKIIGMGDNGMITGNESQYITKTNKDGVIRIVVNKENNEKLYETLKNKLDSKIYKGLSAFASFKTNMERGKDKFCELSVLEQAKVLLQILKVFRCNAKKSNIELIGGGCDSGSIKINKNITDVDFKLVNLSPAGLTVRIRKV

SEQ ID NO: 43 - protein, 1402 aa, synthetic construct
  REGION 1..1402: note = MG44-43 effector
MENNEKYYVGLDIGTSSVGFCATDEDYNVVNKNGHDLWGVVLFDEAKTAKDRRAKRCARRGVQRQKERLMLLKSLFEEEINKVDSNFFARLKASALWEDDKQSVGIFSRNSLFFDGNLNDKEFFKKYPTIYHLRNACVEKPAEDIRFLYLSIHNMLKHRGNFLSESFNAENLDSEGLNVLFENLQNDIIGDADDGEFGFLSLNSENSLTDDQKDKLKLLDQELSKNHFKVGILVEKLKTIFNCTNQNQIALLKAISGGVVNAKTIFVTKENEFEIDCKIDGFDVADETFEQFVSDVTNFNEQAGAIILSAKAIFDRITFKKILGENTYLCRAMIDKYDLHKKQLAEFKKVIKDLYKEKYAEMFKVSDSKINNYVRYIEGSNYKSTNKGISSKCSRADFYKYVKTVLESNADACGDERVQNIFRAIEEDNFLPKLRTSANSVIPYQINKHELEKILENAKEKYQFLNNKDEDGLSVAEKIVSILEYRIPYFVGPLSKKNSKNAWIEKRLDEKIFPWNIEQVVDFDKCEMEFIKRMQNNCSYLSGEPVLPKCSLLYCEYMVLQELNNLQINGQKLQRETKEKIYNIFKEKGSITVSTLKNFLIQNGYFSFDEKINVSGLSDNKFASNLNIYKNFNRILNGEIEKNRSQVEDIIAHATFMSDKNRLEKWLKKSYSNLLNAKQIKEIKGLKIADWGKFSRKFLDGILGIDPRTGESRTIIQIMREEPLNLMEILAKYEFEALNVKKSEKDTIVYDDILQLYCSPAVKRGTWQSVKVVKEIEKIMGRKPAKIFIEVTRADDEKLKGKIIDPRKDKVIKCYKKLKDEIVFGADIKQLKNDLEKAVSLDSKKLYLYFTQMGKCMYTGESININSLIENDCDIDHIFPQSVIKDDSFDNLVLVKRKENIDKSNDIISPTVQNKMKDFWQYLKNNGLISGEKLSRLLRTEELSEAEKKDFVARQIVITNQSAKAVIDLFKTIYGPENVVYSKAKYVSMFRNCEFKFDKEENVEDSDFGKKLKQSLIKCRNMNDLHHAKDAYLNIFVGNVFDEKYSKRYYLKDAFKYGFNLNNAFLKDMPGVLEKEKHLPIVKNTMCSNSPHITFLPREASGQFYKETIYGVVKHQKDYENLEEIKKLEQNDRWNGGNIPLKSSINPLYKTIKYGHFSDGKYSYFTVIEYEKKGKRIIRFVEVPYLFAKNSSNQEDLKNVIAKIIDVKDFKILVEKVKPGTILKIGNGYFKVAGNTGESIKLHNFNQLFLSDEMNQYFKLFSKTVKLMNDKKELNIEDGNIVVEQNRFGEKSLLIKEENMKLYKELIKHLNKSIYKCISLGKIGKDLKNTYEIFENVDIVEQVKTIKGLLDIINGVSGGDITNVGGSKNSGLISFSKTLSKNPVSIINSSPTGFYQKEFKLV

SEQ ID NO: 44 - protein, 1337 aa, synthetic construct
  REGION 1..1337: note = MG44-44 effector
MEKFYIGTDIGTNSAGVACTDENYNLLRVKGKDCWAVRLFDEGKTAVDRRMFRTGRRRLQRRKQRIAWLQDLFAPYMEDETFFIRLNNSQFLPEDKDALLGGDKNTLFAGVYDDKKFHTEFPTVYHLREALMRGGVNDLRLYYLALHHIVKYRGHFLTEGSVDDVRDFGRLLGNLNGVISDVYGDEVPLFSEAAVDEAKNVLLDKTLGIKDRSSKLEKIFGVSDKTSKEIIKGMCGGKISPAVLFGDEYKEEKSFSFKEITDDNFESMRGTYGDNFTVLEVIRSIYGYVIIENLLSGHDDLSSAMIAVYDKHKKDLLALKAFIRSERPEDYNKIFKSTDEKYNYVNYIGYTKKGGDKKKVKKCKDDEFYAYIKKYLQGLTDVKDIAARDKFLKDIEAGSFMQKILHSDNGLFPKQINEYELKKILENMVKSFPATAEIKDKIVTLFNYRIPYYVGPLAGKEETCWAVKKSNEKITPWNFDDVIDKAKSNEKFMLRMTNKCSYLRGEDVLPKASIIYQKFDTLNQLNKLRVNDELLTVDLKQKIFNELFLKYPKVSDKKIIDLLVREGKISQNDRSEVTLSGKDGEFKASMSSYIHLKNILGDFVDKDLSENGGVCENIILWHTLNTDKNIVVDLIKENYGKIPEIKNAIKQLKGLAFHDFGRLSRKLLCEIYTVKEDTGELWNVLDALYETNENLNELLNDEKFSFGRNIKEENGEMTSDVGYKDVEELYVSPAVRRGIWQTLTVVDEYVKAIGKAPDKIFVEVTREDGVKGDAGRTQSRKRRLQEKFRTVSDAYADVIAELGEERFTDLKLRQERLFLYFRQLGRCMYTGERIDLNSINDVTRYDVDHILPRTFIKDDSLDNKVLVLRSKNAKKSDTYPLPAGFSNQRDFWKMLLDKGLIAKVTYDRLTRTEPLREDEYQDFINRQKVITDQTVKVVAELFKRRYPTAKIVYSKAKNVNDFKQKFDLFKCRETNDLHHARDAYLNVVVGNVYDTVFTTPMSMYRKDGDVWRTYNLNKLFTRDVKGAWDNAQSIATVKKVYSKNSMVVTRYATCNNGGFYDQTIYGKEEKGITAPRKGKGPLSDSSKYGGYMTQPTAYFAVVSSKDKNGNEIKTIEAVPVLTTYMAKNDPKAVERYFSERLKDSKIIVPKIKGKQLVSYNGTQCYLAGTTGKQILVHNAVQLFTDGKTDEYVNSLLKLADMKAKSIINVGQEEFVMKTNRDGERKLVIDRANNADLYGMLKRKLERENYAGLSAFATFRKNLEKGEEKFNSLTVYEQTVVLLQILKFFKCNAETADISSIGGGKIVGKIYVNINITNVDFRLIDLSPAGLTERVRKV

SEQ ID NO: 45 - protein, 1337 aa, synthetic construct
  REGION 1..1337: note = MG44-45 effector
MEKFYIGTDIGTNSAGVACTDENYNLLRVKGKDCWAVRLFDEGKTAVDRRTFRTGRRRLQRRKQRIAWLQDLFAPYMEDETFFIRLNNSQFLPEDKDALLGGDKNTLFAGVYDDKKFHTEFPTVYHLREALMRGGVNDLRLYYLALHHIVKYRGHFLTEGSVDDVRDFGRLLGNLNGVISDVYGDEVPLFSEASSSEVKNILLDKTLGIKDRSTELEKIFGVKDKTSKEIIKGLCGGKISPAVLFGDEYKEEKSFSFKEITDENFEGMRATYGDDFALLEGIRSVYGYVTFEKLLSDHTDLSSAMMDVYDKHKKDLLALKAFIRSERPEDYNKIFKSTDEKYNYVNYIGYTKKGGDKKKVKKCKDDEFYAYIKKYLQGLTDVKDIAARDKFLKDIEAGSFMQKILHSDNGLFPKQINEYELKKILENMVKSFPATAEIKDKIVTLFNYRIPYYVGPLAGKEETCWAVKKSNEKITPWNFDDVIDKAKSNEKFMLRMTNKCSYLRGEDVLPKASIIYQKFDTLNQLNKLRVNDELLTVDLKQKIFNELFLKYPKVSDKKIIDLLVREGKISQNDRSEVTLSGKDGEFKASMSSYIHLKNILGDFVDKDLSENGGVCENIILWHTLNTDKNIVVDLIKENYGKIPEIKNTIKQLKGLVFHDFGRLSRKLLCEIYTVKEDTGELWNVLDALYETNENLNELLNDEKFSFGRNIKEENGEMTSDVGYKDVEELYVSPAVRRGIWQTLTVVDEYVKAIGKAPDKIFVEVTREDGIKGDAGRTQSRKRRLQEKFRTVSDAYADVIAELGEERFTDLKLRQERLFLYFRQLGRCMYTGERIDLNNINDITRYDVDHILPRTFIKDDSLDNKVLVLRSKNAKKSDTYPLPAGFSNQRDFWKMLLDKGLIAKVTYDRLTRTEPLREDEYQDFINRQKVITDQTVKVVAELFKRRYPTAKIVYSKAKNVNDFKQKFDLFKCRETNDLHHARDAYLNVVVGNVYDTVFTTPMSMYRKDGDVWRTYNLNKLFTRDVKGAWDNAQSIATVKKVYSKNSMVVTRYATCNNGGFYNATVYSKDEKGITAPRKGKGPLSDSSKYGGYMTQPTAYFAIVSSKDKNGNEIKTIEAVPVLTAYVARTDPKAVEKYFTGRLKDAKIIVPKIKIKQLASYNGTLCCLAGTTDNRILVHNAVELFTDGKTDEYVNSLLKLADMKAKGIINVGQEEFVMKTNRDGERKLVIDRANNADLYDMLKRKLERENYAGLSAFATFRKNLEKGEEKFNSLTVYEQTVVLLQILKFFKCNAETADTTLVGGSAKSGSIKFNNNITNVDFRLIDLSPAGLTERVRKV

SEQ ID NO: 46 - protein, 1465 aa, synthetic construct
  REGION 1..1465: note = MG44-46 effector
MINNLNLSECLDDVVTKEPSDVVTKEPSDVVSQKDGYYVGLDIGTGSCGWAVTDTKYQVLKKSKKRLWGVRLFPTANTAAERRTFRCNRRRLQRRNWRLNLLKGLFEAEINKVDPAFFMRMKESMLQDDDRTTTARNALFADENYKDKNYAEEYPTIYHLRLNLMEKAPKDIRLLYLAIHHILKHRGHFLFENFNVDNISGSFETIWRNVSNIIVEKVFLNPNLESELIDDDGDDGDLNNNAIERLQSHGQEVLQQLLSLNRNRTDVKKRLLSIFEEALGEKADKKKKKSIEQCVAALVGAKFKPFVCVSDDEPEEEQLKIELCFGSANYETDFATKLGSTQQSVFAILKEVYDFVRLQNLLGGRKSISEAKVEMYKEHSKDLIVLKDLIRNSDHLQDNEKTFLYNNVFKKYDAPVKCVGECLYETILRYRALEIKSTTNKDLASAKALYGQLMEIAQKFIEMNAAGAVIEPDILKVCNRIVDGTIFSHAVSVENSVIPQQLHAFELKKILENAKAQFPFLNESDEFGTVVDKIIKLHSFRIPYYVGPVNNYVGELNNSGNKHAWCVKNEGVNLPYTPWTFHKIVDTKKSAQEFINRMTSKCTYLRYADVLPKCSILYSEFEVLQELNNIRFNGCKLKHEQISLLIEELYKKDKNVTLKKLKNLLVSRMGFSREDVEVVSGIDLELKGNMASYVQLNELLKSNGIQLKDEKQKIDVMEQIILWVTIFEDTKVLKDKLSQELGYLLNDKVINSVVGLRFAAWGRLSREFLENVLGRVRNDKLDVPVNIMTRLRKGEGNLMMLLSDAYTYSETVAKLNEQSSEVKKYDSISYDMVDELYVSPSVKRMIWQSLKVVDEIVNIMGGVQPKKIFVEMARGEEKKPERTVSRKKYLQDLYQNCRKQEPELAEQLDKVENSSLLNERLYLYYTQFGRCMYSGEAIDLEKLFDSYDVDHIYPRCYVKDDSLDNKVLVKRTLNGIKSKTYPLGAVAEIAKNFDVCRPLWTKLRDKGLISNEKYKRLIRTTEFTQDELQSFVARQLVETRQSTKEVCNLLKQVYKDSRVVYSKAGNVSDFRHKFSFIKVRELNCLHHAKDAYLNIVVGNVFDEKFCHGDIRKFFSICSHTEEGYTFREGDTDVFSKPGDRLKKLGVWSGLDQIGAIRKQYRQNDIFVTELQEIRSGQFFDMNLSPKEAGLIPPKDIRVQTKNELVSGEILPKTGLDTSKYGGYKGASTSYFAFIEYTEKNKVVRNFVAVPVYINSMKGNLKDNIKDYFAKNGYDSPKVLISQLKMPFFLRDNKTSLTFKVSGVSNGWLTCGLAEQLTLSEKDTAQLKKVVSFLKKLQEDNSYQYSPKFAGFSDSELNELLNILKWKIINTKFKNISKPVTKLLIKAPQFDENLVLSIPDKAQLVMNLVGIFKNSYSSKGNDFSLIGGKKKMGSLLKSIKPEDDFSIVYKSVTGFYVHEIKLNELK

SEQ ID NO: 47 - protein, 1454 aa, synthetic construct
  REGION 1..1454: note = MG44-47 effector
MINNLNLSECLDDVVTKEPSDVVSQKDGYYVGLDIGTGSCGWAVTDLKYQVLKKSKKRLWGVRLFPTADTAAERRTFRCTRRRLQRRNWRLNLLKGLFEAEINKVDPAFFMRMKESMLQDDDRTTTARNALFADENYKDKNYAEEYPTIYHLRLNLMEKAPKDIRLLYLAIHHILKHRGHFLFENFNVDNISGSFETIWRNVSNIIVEKVFSNPDLESEPIDDDGDDGDLNNNAIERLQSHGQEVLQQLLSLNRNRTDVKKRLLSIFEEALGEKADKKRKKSIEQCVAALVGAKFKPFVCVSDDEPEEEQLKIELCFGSANYETDFATKLGSTQQSVFAILKEVYDFVRLQNLLGGRKSISEAKVEMYKEHSKDLIVLKDLIRNSDHLQDNEKTFLYNNVFKKYDAPVKCVGECLYETILRYRALEIKSTTNKDLAPAKALYGQLMEIAQKFIEMNAAGAVIEPDILKVCNRIVDGTIFSHAVSVENSVIPQQLHAFELKKILENAKAQFPFLNESDEFGTVVDKIIKLHSFRIPYYVGPVNNYVGELNNSGNKHAWCVKNEGVNLPYTPWTFHKIVDTKKSAQEFINRMTSKCTYLRYADVLPKCSILYSEFEVLQELNNIRFNGCKLKHEQISLLIEELYKKDKNVTLKKLKNLLVSRMGFSREDVEVVSGIDLELKGNMASYVQLNELLKSNGIQLKDEKQKIDVMEQIILWVTIFEDTKVLKDKLSQELGYLLNDKVINSVVGLRFAAWGRLSREFLENVLGRVRNDKLDVPVNIMTRLRKGEGNLMMLLSDAYTYSETVAKLNEQSSEVKKYDSISYDMVDELYVSPSVKRMIWQSLKVVDEIVNIMGGVQPKKIFVEMARGEEKKPERTVSRKKYLQDLYQNCRKQEPELAEQLDKVENSSLLNERLYLYYTQFGRCMYSGEAIDLEKLFDSYDVDHIYPRCYVKDDSLDNKVLVKRTLNGIKSKTYPLGAVADIAKNFDVCRPLWTKLRDKGLISNEKYKRLIRTTEFTQDELQSFVARQLVETRQSTKEVCNLLKQVYKDSRVVYSKAGNVSDFRHKFSFIKVRELNCLHHAKDAYLNIVVGNVFDEKFCHGDIRKFFSICSHTEEGYTFREGDTDVFSKPGDRLKKLGVWSGLDQIGAIRKQYRQNDIFVTELQEIRSGQFFDMNLSPKEAGLIPPKDIRVQTKNELLSGEILPKTGLDTSKYGGYKGASTSYFAFIEYTEKNKVVRSFAAVPVYINSMKGNLKDNIKDYFAKNGYASPKVLISQLKMPFFLRDNKTNLTFKVSGVSGNSLLCGLAEQLTLSEKDTAQLKKVVSFLKKLQEDNSYQYSPKFAGFSDSELNELLNILKWKITNTKFKNISEPVTKLLEATQFDENLVLSIPDKAKLVMNLVGIFENRDHTNDLSLIGGKKEMGRLRKSIKPKGDFSIVYQSVTGFYVHEIKLNELK

SEQ ID NO: 48 - protein, 1425 aa, synthetic construct
  REGION 1..1425: note = MG44-48 effector
MSNYDNFKKYGDYYIGLDVGTGSCGWAVTDKSYNILKVSGKSLWGVRLFPTADTAAERRAHRCARRRVFRTRQRLNLLEQLFDPEISKVDVGFFQRLKNSEFKEISKNNLFGDNSYKDKDFFKEYPTIYHLRYKLMNEPVDDIRLLFLAVHHIIKHRGHFLFERLDVNNIGASLPELWEQCCSQFVDISLFSNVSDDFQEIADSLKQNLIDMRDDVINVIRTSSDKRSDLKKVFAQLKSVYDEISDPEVKKSTENKVNRWYLLLLGYKVSAAEIFTIEESDEEGLSCKIKFNSSDYDEQIQKINDEFKGVVESEKAVYDVIKLQEILKDCNSISESKVELFNKHAEELRIFKSLLRERLSENLLAEVNKKVNVAKNEKLTTEPKSFYKEIFEERNKNTEKGKICFYYDITHGDKSANKEAIKGSSIYKRLQILAQILLCSSEIYKLSEKEKVLLHRIGDLSIFETQVSADNSVIPYQINLAELDKILKVQSKNFAFLSEKDDAGVSVYDKIKALLTFRIPYYVGPLNNHSKFSWIVKKSQEKIVPWNFESVVDTEKSAEAFIKRMTSKCTYLSGEDVLPKNSIIYSKFMVLNVLNNIRINGMRLDEAQTGLTKKVFDELYCNQINVTQKQLVAYLYNNGFLTSKEELTGFDDEQKVSMSSYVKIKNALGTDNFDINFAESFIKYSTLFPNDYLMIEKRLKREFSSECAKFNENLSKLCRIKFSGWGRLSEKLLTGLLGHNKNSEFDKNSILGFMLNGKGNLMELLSSEYTFSDLISSENSTLDKNDAFSYQNLVEGLYVSPSVKRMIWQTLLVVREITKKIMGYEPSRIFVEMARGATADQKGKRTNSRKKSILALYDKCRKDFDISEIYSSLEKQDDNKLLSDKIYLYYTQLGKSMYTGNKIELEDLLNNSKQYDIDHIIPQSLTKDDSIDNRVLVERTVNEVKDNNYPLSYQIRENQTQFWKHLLDLGLISKSKFERLIRSTSLSNSEKEGFIARQLVETRQSTKAIAGLLSKLYKKAKIIYPKAGLTADFKQKFDLIKVRELNDLHHAKDAYCNIVVGNVYFEKFTSKYQYVIANNERYSFSTSDTSYIFTNQNEKRLQQSGTWDSRNGKSISIVKKYYKRNNILMTYKQEERIGALFNQTLYGPEKGTIPKKKNMSCHDYGGYDSDQNSFFSFISYKDDKGNLKTKLIGIPLRVVYGLSDKSSAISHYLLTEKSNEYIDPKVLIDFLPYNFILKDNETGFLARVVSYATKGRQLVLKQFNSLILNEKNNKMLKAIDNFVSRLKNKSFEVKYDKDKSGFTEEDLSSIYSELKDKTKNTVLKALPKTTVKILTDVDINSYQYSENEKSEPKLLSIEQKAVAICEVIKAFHTEPSDLSLLGGKANSGKMCINSVLNLDKDDYSVVFYSITGFYEKELRLSDLLK

SEQ ID NO: 49 - protein, 1337 aa, synthetic construct
  REGION 1..1337: note = MG44-49 effector
MEKFYIGTDIGTNSAGVACTDENYNLLRVKGKDCWTVRLFDEGKTAVDRRTFRTGRRRLQRRKQRIAWLQDLFAPYMEDETFFIRLNNSQFLPEDKDALLGGDKNTLFAGVYDDKKFHTEFPTVYHLREALMRGGINDLRLYYLALHHIVKYRGHFLTEGSVDDVRDFGRLLGELNEGDSRVYGDDFPTFSEAAVDEAKNVLLDKTLGIKDRSFKLEKIFGVSDKTSKEIIKGMCGGKISPAVLFGDEYKEEKSFSFKEITDDNFESMRGTYGDNFTVLEVIRSIYGYVIIENLLSGHDDLSSAMIAVYDKHKDDLLALKAFIRSERPEDYNKIFKSTDEKSNYVNYIGYTKKGGDKKKVKKCKDDEFYAYIKKYLQGLTDIKDVAARDTFLKDIEDGSFMPKILHSDNGLFPRQINEVELKKILDNMVKSFPATAEIKDKIVTLFNYKIPYYVGPLAGKEETCWAVKKSNEKITPWNFDDVIDKAKSNEKFMLRMTNKCSYLRGEDVLPKASIIYQKFDTLNQLNKLRVNDELLTVDLKQKIFNELFLKYPKVSDKKIIDLLVREGKISQNDRSEVTLSGKDGEFKASMSSYIHLKNILGDFVDKDLSENGGVCENIILWHTLNTDKNIVVDLIKENYGKIPEIKNAIKQLKGLVFHDFGRLSRKLLCEIYTVKEDTGELWNVLDALYETNENLNELLNDEKFSFGRNIKEENGEMTSDVGYKDVEELYVSPAVRRGIWQTLTVVDEYVKAIGKALDKIFVEVTREDGIKGDAGRTQSRKRRLQEKFRTVSDAYADVIAELGEERFTDLKLRQERLFLYFRQLGRCMYTGERIDLNSINDITRYDVDHILPRTFIKDDSLDNKVLVLRSKNAKKSDTYPLPAGFSNQRDFWKMLLDKGLIAKVTYDRLTRTEPLREDEYQDFINRQKVITDQTVKVVAELFKRRYPTAKIVYSKAKNVNDFKQKFDLFKCRETNDLHHARDAYLNVVVGNVYDTVFTTPMSMYRKDGDVWRTYNLNKLFTRDVKGAWDNAQSIATVKKVYAKNSMIVTRYATCNSGGFYDQTIYGKDEKGITAPRKGKGSLSDSSKYGGYMTQPTAYFAIVSSKDKNGNEIKTIEAVPVLTAYMAKNDPKAVERYFTGRLKDAKIIVPKIKIKQLASYNGTLCCLAGTTDNRILVHNAVELFTDGKTDEYVNSLLKLADMKAKGIINVGQEEFVMKTNRDGERKLVIDRANNADLYDMLKRKLERENYAGLSAFATFRKNLEKGEEKFNSLTVYEQTVVLLQILKFFKCNAETADTTLVGGSAKSGSIKFNNNITNVDFRLIDLSPAGLTERVRKV

SEQ ID NO: 50 - protein, 1402 aa, synthetic construct
  REGION 1..1402: note = MG44-50 effector
MENNEKYYVGLDIGTSSVGFCATDEDYNVVNKNGHDLWGVVLFDEAKTAKDRRAKRCARRGVQRQKERLMLLKSLFEEEINKVDSNFFARLKASALWEDDKQSVGIFSRNSLFFDGNLNDKEFFKKYPTIYHLRNACVEKPAEDIRFLYLSIHNMLKHRGNFLSESFNAENLDSEGLNVLFENLQNDIIGDADDGEFGFLSLNSENSLTDDQKDKLKLLDQELSKNHFKVGILVEKLKTIFNCTNQNQIALLKAISGGVVNAKTIFVTKENEFEIDCKIDGFDVADETFEQFVSDVTNFNEQAGAIILSAKAIFDRITFKKILGENTYLCRAMIDKYDLHKKQLAEFKKVIKDLYKEKYAEMFKVSDSKINNYVRYIEGSNYKSTNKGISSKCSRADFYKYVKTVLESNADACGDERVQNIFRAIEEDNFLPKLRTSANSVIPYQINKHELEKILENAKEKYQFLNNKDEDGLSVAEKIVSILEYRIPYFVGPLSKKNSKNAWIEKRLDEKIFPWNIEQVVDFDKCEMEFIKRMQNNCSYLSGEPVLPKCSLLYCEYMVLQELNNLQINGQKLQRETKEKIYNIFKEKGSITVSTLKNFLIQNGYFSFDEKINVSGLSDNKFASNLNIYKNFNRILNGEIEKNRSQVEDIIAHATFMSDKNRLEKWLKKSYSNLLNAKQIKEIKGLKIADWGKFSRKFLDGILGIDPRTGESRTIIQIMREEPLNLMEILAKYEFEALNVKKSEKDTIVYDDILQLYCSPAVKRGTWQSVKVVKEIEKIMGRKPAKIFIEVTRADDEKLKGKIIDPRKDKVIKCYKKLKDEIVFGADIKQLKNDLEKAVSLDSKKLYLYFTQMGKCMYTGESININSLIENDCDIDHIFPQSVIKDDSFDNLVLVKRKENIDKSNDIISPTVQNKMKDFWQYLKNNGLISGEKLSRLLRTEELSEAEKKDFVARQIVITNQSAKAVIDLFKTIYGPENVVYSKAKYVSMFRNCEFKFDKEENVEDSDFGKKLKQSLIKCRNMNDLHHAKDAYLNIFVGNVFDEKYSKRYYLKDAFTYGFNLNNAFLKDMPGVLEKEKHLPIVKNTMCSNSPHITFLPREASGQFYKETIYGVVKHQKDYENLEEIKKLEQNDRWNGGNIPLKSSINPLYKTIKYGHFSDGKYSYFTVIEYEKKGKRIIRFVEVPYLFAKNSSNQEDLKNVIAKIIDVKDFKILVEKVKPGTILKIGNGYFKVAGNTGESIKLHNFNQLFLSDEMNQYFKLFSKTVKLMNDKKELNIEDGNIVVEQNRFGEKSLLTKEENMKLYKELIKHLNKSIYKCISLGKIGKDLKNTYEIFENVDIVEQVKTIKGLLDIINGVSGGDITNVGGSKNSGLISFSKTLSKNPVSIINSSPTGFYQKEFKLV

SEQ ID NO: 51 - protein, 1360 aa, synthetic construct
  REGION 1..1360: note = MG44-51 effector
MQDYFIGIDAGTESCGIAATDEQYDLLRCKGNDMWAVNLFDKANDATKRRQQRAVRRRLFRRKQRIDLLQDVFYDEIAKKDEKFFIKLNNSVFLLEDKDESVRTECTLFADPDYTDREYYKKYPTIFHLRKALIDGSETEIRHFYLALHHIIKYRGHFIFEGQKIDSIKDVAPVLKEINDFIAENFEDSAVFFDVSKANELQDAVNDRTWNRTNGAKAIERIFNLNTKQGKEFCKALAGGQFNLSILFDNELYKDNETSTYSFKKSTEENFAKLLEECGDDATLIELLKKVYDWEVFIKMLKGKNYISDAMAAIYEKHKSDLRKLKNIVRKYMSDADYKEIFRQYGEKLKNYSAYAGIAKTNGVKHYVERCKDKKDFYDFLKKKFDMHKTALQNDEDYQSIISDMENETFMPRIIDADSGVFPYQINEIELNEICDKLADNYPSFNEKDESGYTKIEKIKKIFRFRIPYYVGPLNVNLDVKSNAWIVKKKDEKVLPWNFEEVVDTEACAEMFIRRMTNKCSYLKGADVIPKCSILYSKFMTLNQLNKLTINELPITVWQKQMIFEKLFLTDKKPTKKKLTRLLINEGLINKNEQPVYGGIDTDFTVNMASYVAFRSIFGDKTEDNIDVIEGIILIMSLFTDKNDVERLVLKKFGHIPEVQEKIKVIKGFNFKDFGKLSKEFLTELSAEDEVGDGELPVTIMDLLWDTNMNLMEIINDDKYGFAEKIKEYNGEEDSDVKFEDLDDYYLSPMVKRGVWRALVMVDEYVKALKNPPKKIFIEVTRGDGKKGKRTKSRLTELQEFYKANRQFIKDYDDLIQELNRKNEQDLRQERLYLYFKQLGRCMYSGEKIVLEDLPTNTYDIDHIIPQSLKKDDSIHNNKVLVLRERNKTKSDDYPINPDWQRNNIAFWKLLRDKGCITAEKYARLTRKDEITESEMHDFINRQIVVAGQSATALARILQRKYPSSKIVYSKAGNVSDFRQKYNLLKNRNVNDLHHARDAYLNIVVGNVFDTRFGIKGTGYYYYDENGNPHRYNLTKIYNHNVGNAWDAEVTIDTVKRNYNKNSMIVVRRPFIGRGEFYNQTVYRKGEGIIPIKSEGPMSNLDKYGGYQKSETKYFMAVDSLDKKGKHMRTIEAMSIYYDKMISIGKMTMEQYLTEIRGLNQPEVVLSPINVRSLIRYNGSLATINGVTGDRLVLNNANQWHVDSKTSDCLRIVDKFLEMKNLFEKEKDGEEILVSSSRDGARKDTVSRKENLLLYELIERQLSKEMYKGLSAFETIKKYVETGKDKFNSLDLIKQCETIAELVKFLQCKGLLVNLSEIGGSVKSGIMLASKKITDCEVVLYNISLTGLHKNSVVLNKPQK

SEQ ID NO: 52 - protein, 1331 aa, synthetic construct
  REGION 1..1331: note = MG44-52 effector
MEKFYLGADIGTNSVGVACTDENYKILRARGKDLWCVRLFDEANTAAERRNFRTMRRRLERRRKRIIWLQELFVPYINDATFFIRLNDGGLLAEDKSEPIKGDKNTLFGGEYDDKAFHKQFPTIYHLRKALMDGGGYDLRLYYLALHHIIKYRGHFLFEGGINDIHDLSKLITDLNGATEAVFGEDAFKFDESLSAEAKGVLTDKTKGVKDKQSGLEKIFGAIDKVTKEIIKGICGGKISPSAIFGDEYKEEKSFSFKDLTDETFASMESVYGDDFIVLSAIRAIYNFVTFEKLLSGYEDISSAMIAIYEKHKSDLKKLKTFVKNETPDEYNRIFKSTKESANYVNYIGYTKKGGDKKKVEKCKDEDFYAYVKKYLNSLCDVKNEEARLEMLADIERGEFMPKILHSDGGLFPRQVNEAELAKIAENMVMAHPETAAVKDKLLPLFRYKIPYYVGPLAGKNSWAVRKEGEITPWNFNDKIDLAASNEEFMRRMTNKCSYLRGEDVLPKASMIYQKFDVLNQLNKLKYDGRALSVELKQKIFNELFTKYQKASDKKIIELLIREGKISPNEKAAALTGKDGDLKASMSSYIRFKKILGDFVDTDEGFTICEKIILWHTLNTDKSVVEDLIKKNYGGVKIIKDNLKVLKGLTFNDFGRLSEKFLTGLIVPDKSTGEMFSILDALYETNENLNELLFDERFDFMGAVKEENGECSEEVTLKDVEELYVSPAVRRGIWQSLTVIDEYVAAIGKSPDKIFVEVTREDGVKGDAGRKLSRKIQLAEKFKGIEQTYSEIAAEFNSDTITDMRLRQERLYLYFRQLGRCMYTGERINLGQINDATLYDVDHILPRTYIKDDSLDNKVLVLRSANAEKSDTYPVPDKFRKQSEFWKMLLDKTLISRTTYDRLMRTAPLTDDDYSDFINRQKVITDQTAKAVAELLERKYPNTKIVYSKAKNVNDFKQEFKIFKCRETNDLHHARDAYLNVVVGNVYDTVFSTPMSMFRQDGDKWRAYNLKNLFKRDAVGAWNVKSSIETVKNTLKKPSMTVTQYAFSNKAYFYKQTVCGKGDSAITAPRKGAGALSDASKYGGYKGQSTAYFAIVSSVGKKGEAVKYIEAVPVLTTYQAKSDDGAVQKYFESYLKNPVILVPKVKIRQLVSFNGTLCYLAGITDNRIIAHNANQLFTDNKTDEYVNALLKIVEMQSKNMLDLYSDSLVMKTNSAGDEKLVVDKNKNLELYQRLTNKLNEKIYSGISAFSSFKNNLLNGEEKFAELELPEQAKVIIQILKFFKCNAETSDLTSIGGAKGSGSIKFNKNITDVDFRLINRSPAGLTEKVRRV

SEQ ID NO: 53 - protein, 788 aa, synthetic construct
  REGION 1..788: note = MG44-53 effector
MFLKYPKVSDKKIKDYLIRNGHFSPTDGEITLSGKDGEFKASMSSYIQLKRILGDFVDKDLENGGEVCENIILWHTLNTDKKIVYDLIEKRYKNIPEIADSVKALKGLSFKNFGRLSKKFLVDLYSADNETGELVNILDVLYETNENLNEILNDEKYAFGKLVDEANGVADSKITYEDIEKLYVSPAVRRGIWQTVTMIDEYVEAIGRTPDKIFVEVTREDGVKGDAGRTQPRKRQLQEKYKNISETYADVISELGDEKYSDMKLRQERLFLYFRQLGRCMYSGQRIDLDRLDTDTYDVDHILPRTFIKDDSLDNKVLVLRSKNAEKADRYPLPQGFSGQQDFWKMLLDKNLIAKTTYDRLTRTEPLGDNDYKDFINRQKVITDQTVKAVAELMKRKYPTAKIVYSKAKNVNDFKNKFDIFKCRETNDLHHARDAYLNAVVGNVYDTVFSNPLDMFRKDGDMWRTYNLKKLFTRDVKGAWDCSRIARIKSICGSHTMAVTRYAYCNKGEFYNQTVYGKDDAGVSSPRKSNGPLSDTKKYGGYKSQTTAYFAIVSSLDKKGNRVKTIEAVPVLVAYRLKNNPKAIEEYYNSYLKSPEILIPKIKNKQLVSYNGSYAYIAGVTGNQIILHNAAELFTDNKTDEYVNELLKIVDMDAKKMLVGDEPRYVTKTNRYKKEKVVIDKEKNLELYSRLKDKLSDKIYSGLSAFSTFAKNMESGEEKFKELAIVEQAKTLIQILKMFKCNAETSDLKFIGGSSRSGTVSINKKIDGVKLEIIHLSPAGLRVIKNKV

SEQ ID NO: 54 - protein, 544 aa, synthetic construct
  REGION 1..544: note = MG44-54 effector
MGKFYLGTDIGTNSVGIACTDENYELIRAKGKDCWAVRLFDESKTAETRRNFRTSRRRLERRKQRISWLQALFAPYINDETFFIRLNNSQFLPEDKDEILQADKNTLFGDEGYTDKDYHAEFPTIYHLREKLIEGGKYDLKLYYLAIHHIVKYRGHFLFEGATMEEIRDIKRLFENLNSVWEATYAENVPHINLSKSDEAKEILLDTKKGLRDKQIALEKLFGENTALMKESIKAMLGGKISPETLFGEEYKDEKSFSFKDMDEEAFDALQSTYGDNFECLNALRSIYNFVAFEKLLCGHKNISSAMIAVYNKHAADLSLLKSFIRSERPNDYNKIFKSTTEKANYVNYIGYTKKGGEKKKVAKCKSDDEFFAYMKKYLSSLDDIKDGATRDKILGEIENGSFLPKILHSDKGLFPRQVNEAELKAIASNMVKYYPETKEIADKIIPLFEYRIPYFVGPLAGVNSWAVRKSGEITPWNIGEKIDLAASNEEFMRKMTSKCSYIFGEDVLPKCSIIYQKFDVLNQLNKLRVNDRPLTVDLKKGNF

SEQ ID NO: 55 - protein, 1337 aa, synthetic construct
  REGION 1..1337: note = MG44-55 effector
MEKFYIGTDIGTNSAGVACTDENYNLLRVKGKDCWAVRLFDEGKTAVDRRTFRTGRRRLQRRKQRIAWLQDLFAPYMEDETFFIRLNNSQFLPEDKDALLGGDKNTLFAGVYDDKKFHTEFPTVYHLREALMRGGVNDLRLYYLALHHIVKYRGHFLTEGSVDDVRDFGRLLGNLNGVISDVYGDEVPLFSEASSSEVKNILLDKTLGIKDRSTELEKIFGVKDKTSKEIIKGLCGGKISPVVLFGDEYKEEKSFSFKKITDENFEGMRATYGDDFALLEGIRSVYGYVTFERLLSDHTDLSSAMMDVYDKHKKDLLALKAFIRSERPEDYNKIFKSTDEKSNYVNYIGYTKKGGDKKKVKKCKDDEFYAYIKKYLQGLTDVKDVAARDKFLKDIEAGSFMQKILHSDNGLFPKQINEYELKNILDNMVKSFPATAEIKDKIVTLFNYRIPYYVGPLAGKEETCWAVKKSNEKITPWNFDDVIDKAKSNEKFMLRMTNKCSYLRGEDVLPKASIIYQKFDTLNQLNKLRVNDELLTVDLKQKIFNELFLKYPKVSDKKIIDLLVREGKISQNDRSEVTLSGKDGEFKASMSSYIHLKNILGDFVDKDLSENGGVCENIILWHTLNTDKNIVVDLIKENYGKIPEIKNAIKQLKGLAFHDFGRLSRKLLCEIYTVKEDTGELWNVLDALYETNENLNELLNDEKFSFGRNIKEENGEMTSDVGYKDVEELYVSPAVRRGIWQTLTVVDEYVKAIGKAPDKIFVEVTREDGIKGDAGRTQSRKRRLQEKFRTVSDAYADVIAELGEERFTDLKLRQERLFLYFRQLGRCMYTGERIDLNNINDVTRYDVDHILPRTFIKDDSLDNKVLVLRSKNAKKSDTYPLPAGFSNQRDFWKMLLDKGLIAKVTYDRLTRTEPLREDEYQDFINRQKVITDQTVKVVAELFKRRYPTAKIVYSKAKNVNDFKQKFDLFKCRETNDLHHARDAYLNVVVGNVYDTVFTTPMSMYRKDGDVWRTYNLNKLFTRDVKGAWDNAQSIATVKKVYSKNSMVVTRYATCNNGGFYNATVYSKDEKGITAPRKGKGPLSDSSKYGGYMTQPTAYFAIVSSKDKNGNEIKTIEAVPVLTAYVAKNDPKAVEKYFTGRLKDAKIIVPKIKIKQLASYNGTLCCLAGTTDNRILVHNAVELFTDGKTDEYVNSLLKLADMKAKGIINVGQEEFVMKTNRDGERKLVIDRANNANLYDMLKRKLERENYAGLSAFATFRKNLEKGEEKFNSLTVYEQTVVLLQILKFFKCNAETADTTLVGGSAKSGSIKFNNNITNVDFRLIDLSPAGLTERVRKV

SEQ ID NO: 56 - protein, 1170 aa, synthetic construct
  REGION 1..1170: note = MG44-56 effector
MIYGGDYDLRLYYLALHHIIKYRGHFLFEGSMNDIRNINRLFTALNDTLKNVYGDDEAPEFAAISAEKAKEILLDPKKNIRDKEQELEKLFGAESKLEKEIIKGMCGAKISPSVLFGESFKEEKSFSFKELNDESFDAMRQTYGDNFALPEALRAIYSFVTFEKLLVGKPDISSAMIAVYEKHKSDLKLLKDFLRAESGEIYGKVFKNTNEKANYVNYVGYTKKGGDKKKVKTCGYEEFRQYLKKTIAAIAAKDKETQNLILSELENGSFLPKILHSDNGLFPHQVNEDELVKIADNMAKNHPETTDMAKKLRKLFLFRVPYFVGPLAGENSWAVRKTDEKVTPWNFDDVIDKAASNEEFMRRMTNHCSILHAEDVLPKCSMIYQKYNVLNQLNKLKINDCPLPSVELKQKIFNELFLKYNKVSDKKIIDLLVRSGEVSPEEARAITLTGKDGELNASMSSYITFKNILGDFADKPENAEILEKIILWHTLNTDKKIVEDLILKHFGKIPEIKNNVKALKGLVFKDFGRLSEKLLTGLKAADKETGELLSITDILYETNQNLNEILANERYNFAELIKAENGEESDEIGYKDIEELYVSPAVRRGIWQSLIMADEYINAVGKVPDRIFIEFTRTDGTKGEAGKKLSRKKQLSDKFKAIKDAEFQDIIAELNSDEITDMKLRQERLYLYFRQLGKCMYSGKNIDLSLLNTDNYDVDHILPRSYTKDDGLDNKALVLRDCNAKKADHYPVPSDLRQVKLWKLLHEKGLISKKTFDRLMRTEPLGEGDYEDFINRQKVITDQTAKAVAELLQKKYPTSQIVYSRAKNVVDFKNRFSLYKCRETNNLHHARDAYLNIVVGNAKGAWDENSLQLVKSTFKKHTMAVTQYAFCNMGAFYRQTVYPKGDPGITAPRKGNGALANTQKYGGYKKEETSYFVVVQSKGKKGQTIKTIEAVPILTAYRQRTNPDAVLDYFKTYLTEPTILIPKLKVRQLVSYNGTPLYIASITGSQISAYNATELFTDNKTDEYVNQLSKLIEMSKNGTISEENGEYIIKTNRNKDVKLTINRQSNIELYDTLKNRLSKSSFQGLSSFSTFKSNLTNGEEKFTKLPIIDQCVVLLQILKFFKCNAETANISLIGGGETCGRLYLNKNITDAKFDIICKSPAGLTERIKKV

SEQ ID NO: 57 - protein, 1454 aa, synthetic construct
  REGION 1..1454: note = MG44-57 effector
MINNLNLSECLDDVVTKEPSDVVSQKDGYYVGLDIGTGSCGWAVTDLKYQVLKKSKKRLWGVRLFPTADTAAERRTFRCTRRRLQRRNWRLNLLKGLFEAEINKVDPAFFMRMKESMLQDDDRTTTARNALFADENYKDKNYAEEYPTIYHLRLNLMEKAPKDIRLLYLAIHHILKHRGHFLFENFNVDNISGSFETIWRNVSNIIVEKVFLTPDLESESIDDDGDDGDLNNNAIERLQSYGQEVLQQLLSLNRNRTDVKKRLSSIFEEALGEKADKKKKKSIEQCVAALVGAKFKPFVCVSDDEPEEEQLKIELCFSSASYETDFATKLGSTQQSVFAILKEVYDFVRLQNLLGGRKSISEAKVEMYKEHSKDLIVLKDLIRNSDHLQDNEKTSLYNNVFKKYDAPLKCVGECLYETILRYRALEIKSTTNKDLAPAKALYGQLMEIAQKFIEMNAAGAVIEPEILKVCNRIVDGTIFSHAVSVENSVIPQQLHAFELKKILENAKAQFPFLNESDEFGTVVDKIIKLHSFRIPYYVGPVNNYVGELNNSGNKHAWCVKNEGVNLPYTPWTFHKIVDTKKSAQEFINRMTSKCTYLRYADVLPKCSILYSEFEVLQELNNIRFNGCKLKHEQISLLIEELYKKDKNVTLKKLKNFLVSRMGFSREDVEVVSGIDLELKGNMASYVQLNELLKSNGIQLKDEKQKIDVMEQIILWVTIFEDTKVLKDKLSQELGYLLNDKVINSVVGLRFAAWGRLSREFLENVLGRVRNDKLDVPVNIMTRLRKGEGNLMMLLSDAYTYSETVAKLNEQSSEVKKYDSISYDMVDELYVSPSVKRMIWQSLKVVDEIVNIMGGVQPKKIFVEMARGGENKPERTVSRKKYLQDLYQNCRKQEPELAEQLDKVENSSLLNERLYLYYTQFGRCMYSGETIDLEKLFDSYDVDHIYPRCYVKDDSLDNKVLVKRTLNGIKSKTYPLGAVADIAKNFDVCRPLWTKLRDKGLISNEKYKRLIRTTEFTADELQSFVARQLVETRQSTKEVCNLLKHVFKDSQVVYSKAGNVSDFRHKFSFIKVRELNCLHHAKDAYLNIVVGNVFDEKFCHGDIRKFFSICSHTEEGYTFREGDTDVFSKPGDRLKKLGVWSGRDQIGAIRKQYRQNDIFVTELQEIRSGQFFDMNLSPKEAGLIPPKDIRVQPKNELVSGEILPKTGLDTSKYGGYKGASTSYFAFIEYTEKNKVVRSFAAVPVYINSMKGNLKDNIKDYFAKNGYASPKVLISQLKMPFFLRDNETSLTFKVYGVSGSSLSCGLVEQLTLSEKDTAQLKKVVSFLKKLKEDNSYQYSPKFAGFSDSELNELLNILKWKIINTKFKNISDSVTKLLKATQFDENLVLSIPDKAKLVMNLVGIFENRDHFNDLSLIGGKKQMGRLLKSIKPKGDFSIVYQSVTGFYVHEIKLNELK

SEQ ID NO: 58 - protein, 1337 aa, synthetic construct
  REGION 1..1337: note = MG44-58 effector
MEKFYIGTDIGTNSAGVACTDENYNLLRVKGKDCWAVRLFDEGKTAVDRRTFRTGRRRLQRRKQRIAWLQDLFAPYMEDETFFIRLNNSQFLPEDKDALLGGDKNTLFAGVYDDKKFHTEFPTVYHLREALMRGGVNDLRLYYLALHHIVKYRGHFLTEGSVDDVRDFGRLLGELNEGDSRVYGDDFPTFSEAAVDEAKNVLLDKTLGIKDRSSKLEKIFGVSDKTSKEIIKGMCGGKISPAVLFGDEYKEEKSFSFKEITDDNFESMRGTYGDNFTVLEVIRSIYGYVIIENLLLGHDDLSSAMIAVYDKHKKDLLALKAFIRSERPEDYNKIFKSTDEKYNYVNYIGYTKKGRDKKKVKKCKDDEFYAYIKKYLQGLTDVKDVAARDKFLKDIEAGSFMQKILHSDNGLFPKQINEYELKKILDNMVKSFPATAEIKDKIVTLFNYKIPYYVGPLAGKEETCWAVKKSNEKITPWNFDDVIDKAKSNEKFMLRMTNKCSYLRGEDVLPKASIIYQKFDTLNQLNKLRVNDELLSVDLKQKIFNELFLKYPKVSDKKIIDLLVREGKISQNDRSEVTLSGKDGEFKASMSSYIYLKNILGDFVDKDLSENGGVCENIILWHTLNTDKNIVVDLIKENYGKIPEIKNAIKQLKGLGFHDFGRLSRKLLCEIYTVKEDTGELWNVLDALYETNENLNELLNDEKFSFGRNIKEENGEMTSDVGYKDVEELYVSPAVRRGIWQTLTVVDEYVKAIGKAPDKIFVEVTREDGIKGDAGRTQSRKRRLQEKFRTVSDAYADVIAELGEERFTDLKLRQERLFLYFRQLGRCMYTGERIDLNNINDITRYDVDHILPRTFIKDDSLDNKVLVLRSKNAKKSDTYPLPAGFSNQRDFWKMLLDKGLIAKVTYDRLTRTEPLREDEYQDFINRQKVITDQTVKVVAELFKRRYPTAKIVYSKAKNVNDFKQKFDLFKCRETNDLHHARDAYLNVVVGNVYDTVFTTPMSMYRKDGDVWRTYNLNKLFTRDVKGAWDNAQSIATVKKVYSKNSMVVTRYATCNNGGFYNATVYSKDEKGITAPRKGKGPLSDSSKYGGYMTQPTAYFAIVSSKDKNGNEIKTIEAVPVLTAYVAKNDPKAVEKYFTGRLKDAKIIVPKIKIKQLASYNGTLCCLAGTTDNRILVHNAVELFTDGKTDEYVNSLLKLADMKAKGIINVGQEEFVMKTNRDGERKLVIDRANNANLYDMLKRKLERENYAGLSAFATFRKNLEKGEEKFNSLTVYEQTVVLLQILKFFKCNAETADTTLVGGSAKSGSIKFNNNITNVDFRLIDLSPAGLTERVRKV

SEQ ID NO: 59 - protein, 1402 aa, synthetic construct
  REGION 1..1402: note = MG44-59 effector
MENNEKYYVGLDIGTSSVGFCATDEDYNVVNKNGHDLWGVVLFDEAKTAKDRRAKRCARRGVQRQKERLMLLKSLFEEEINKVDSNFFARLKASALWEDDKQSVGIFSRNSLFFDGNLNDKEFFKKYPTIYHLRNACVEKPAEDIRFLYLSIHNMLKHRGNFLSESFNAENLDSEGLNVLFENLQNDIIGDADDGEFGFLSLNSENSLTDDQKDKLKLLDQELSKNHFKVGILVEKLKTIFNCTNQNQIALLKAISGGVVNAKTIFVTKENEFEIDCKIDGFDVADETFEQFVSDVTNFNEQAGAIILSAKAIFDRITFKKILGENTYLCRAMIDKYDLHKKQLAEFKKVIKDLYKEKYAEMFKVSDSKINNYVRYIEGSNYKSTNKGISSKCSRADFYKYVKTVLESNADACGDERVQNIFRAIEEDNFLPKLRTSANSVIPYQINKHELEKILENAKEKYQFLNNKDEDGLSVAEKIVSILEYRIPYFVGPLSKKNSKNAWIEKRLDEKIFPWNIEQVVDFDKCEMEFIKRMQNNCSYLSGEPVLPKCSLLYCEYMVLQELNNLQINGQKLQRETKEKIYNIFKEKGSITVSTLKNFLIQNGYFSFDEKINVSGLSDNKFASNLNIYKNFNRILNGEIEKNRSQVEDIIAHATFMSDKNRLEKWLKKSYSNLLNAKQIKEIKGLKIADWGKFSRKFLDGILGIDPRTGESRTIIQIMREEPLNLMEILAKYEFEALNVKKSEKDTIVYDDILQLYCSPAVKRGTWQSVKVVKEIEKIMGRKPAKIFIEVTRADDEKLKGKIIDPRKDKVIKCYKKLKDEIVFGADIKQLKNDLEKAVSLDSKKLYLYFTQMGKCMYTGESININSLIENDCDIDHIFPQSVIKDDSFDNLVLVKRKENIDKSNDIISPTVQNKMKDFWQYLKNNGLISGEKLSRLLRTEELSEAEKKDFVARQIVITNQSAKAVIDLFKTIYGPENVVYSKAKYVSMFRNCEFKFDKEENVEDSDFGKKLKQSLIKCRNMNDLHHAKDAYLNIFVGNVFDEKYSKRYYLKDAFKYGFNLNNAFLKDMPGVLEKEKHLPIVKNTMCSNSPHITFLPREASGQFYKETIYGVVKHQKDYENLEEIKKLEQNDRWNGGNIPLKSSINPLYKTIKYGHFSDGKYSYFTVIEYEKKGKRIIRFVEVPYLFAKNSSNQEDLKNVIAKIIDVKDFKILVEKVKPGTILKIGNGYFKVAGNTGESIKLHNFNQLFLSDEMNQYFKLFSKTVKLMNDKKELNIEDGNIVVEQNRFGEKSLLTKEENMKLYKELIKHLNKSIYKCISLGKIGKDLKNTYEIFENVDIVEQVKTIKGLLDIINGVSGGDITNVGGSKNSGLISFSKTLSKNPVSIINSSPTGFYQKEFKLV

SEQ ID NO: 60 - protein, 1457 aa, synthetic construct
  REGION 1..1457: note = MG44-60 effector
MVNKTNKFRIHLFELVMLFYFFSISQKRKVVKEIMKYFLGLDIGTNSVGWAVTDEKFNVLRKNRKHLWGVRLFEAANTAEKRRAKRSARRGRARKKLMQFWLQQIFAHEIEKVDKDFFIRLKNSAYYSDDKDCRLEGGKDSVFRFDINGNKYTDANYFADYPTIYKLREELLKVPAKDIRFLYLAVYNLIKNRGHFYESGGESENVGFSDLLANIKNLCDRMDDVEVTFKTEISDADLINVLKNNKYKKDQKTALVELMNCQPQKKHGDNKDKIIVESFISGKIDVNKLFSTDEEKSASCVDLTDIEKFETCVSKLTGLSDDQVLLLEKIKNAYDEIVLKKLIGDCNYVCEAKLKQYNLYKDDLAKLKTFIRKYHKSRYNEIFRSSYTTNNEKTNYSLYTQRLVLGGKNVKLGIELQKDGNNYKEIYHDYKKNIESLHKYLKNILESEAEFQDANYETSKKAILDKIADGSFLVKLRNKANASIPNSLLVKELKKILETNATKFEFLKQKDETGLTNAEKIIKIMQFRVPYFVGPVTTKNNSKNVWATIKNNSLTYTPWNLDKIVDFDQSENDFIRRMTNKCTYFKNEDVLPKNSVIFCKYKVLNELNKITVNGVALNDGKEDVNLKRRIFDELFMTKSKVTVLDIKKLLARSGKYGAEPRSIEIGGIDKDFKSNFAPYITLKNILGDKVNDVTLTEEIIKLLTIMQDKKRVTEKLKKEFPFLTDDELRKIRALNYSGFGTLSKKILNDVRFVDKSTGEVFCGVNDALWHTNQNLQQILHNEKYTLKEEIETIEKQFGEEIEYEAVENCYCSPSVKRGIWQSVLVIKELRKHLGEYPQKIFVETTRSDEEKGEQGRKLSRLKKLQDTYKSKKDEISKIAKNYNELLKELNNKQESELREDKLYLYFLQNGKCAYSGEPLTIEDLSDCDIDHIIPRCFVKDDSLNNRVLVRKRYNNIKSDLYPLPQEWVQNCAHIWKSWLEQGMMSQSKYDKLTRRENLTPEDRAGFINRQLVETSQSVKGLIDILRRFVENEKNIVFSKAEVVSDFRRWHGIPKCRDANDLHHAIDAYLNIVVGNVTRAKFTDNPVNYFKKKQELGDFIRPIKTDDSSDDVEKQTENPLKIFNKYIYDYSTKELIWQGYKDVSRIRDICKRNDISVSKKMEMQTNAAFYLETIHKSRKNNPNTEAKVNLKGKGTLSNIERYGGFGDQTTAYFMIVKSLKSGKDIVTIERMTTYAYAKIKSNLLTLQEYLTGELGLNNPVILKDKLPLYSELALGKGRFLLSGTSGSSLLLHNFNEWYVDFETQKYIKILSKFFSLSNANVTMDISRDKIVVSPAKSKNGKELSLTKEENIQIYKKIADYVNTDMYSVITKGEISKILNEKIEGFSNLEMVEQSKFLYGMVTTISNRGNLIWKLDAIGRSGQLTNYRINKNVTGKGYKLVKRNVLGYVIYQQDLENVR

SEQ ID NO: 61 - protein, 1344 aa, synthetic construct
  REGION 1..1344: note = MG44-61 effector
MNENKSFYVGLDIGTDSVGVACTDENYNLRRSNGKDCWAVRLFDAANTAQERRSFRTARRRLERRKYRLGQLQALFAPYIDDDKFFIRLNNSQFFVDDKDECLSADKNTLFADSGYTDKEFHEAFPTIYHLRLALQNGHASDIRLYYLALHHIVKYRGHFLFEGSVGDIRDIKKLFVDLNTACEAVYADEVPYFDTQLCEQAKNTLMKPSGIRDKQKALEALFGKTTKAQGEIIKAMSGGKLALKTMFEGRYEEEKSFSLSEMQDEAFDALAEVFGDDFVLLQALRNLCNFVKFEKLFAGQPNISSAMIAVYDKHAADLAMLKIFLKTYAPQMYNKVFRSVTESANYVNYIGYNKKKSAKTKVAPCKYEDFLAFVKKIVAAVDCADTELRDKILAEIDNKTFLPKILHADNGLIPHQVNEDELVKIVKSMTEAFPETQAMAKQILPLFRFRIPYYVGPLVGENSWAVRKSDERITPWNFNEVIDLAASNEQFMRRMTNKCTYLHGEDVLPKCSIVYQKFNTLNQINKLQVDGRAISVELKKKIFNELFLTKSKVSDKAIVDLLVREGVVSPQERANVVLSGKDGEIKASMSSYIQLKRILGDFVDEDLASDGGVCENIILWHTLNTDKSIVEDLIRRNYGDNPHITPYIKQLKGLMFANFGRLSDKLLTGLRTVDKSTGELRSILDLLYDTNQNFNEIIFDERYDFAELIRKENSGESTEITYEEDIATMRVSPALKRGIWQSLQLVDEYVEALGGTPDKIFVEVTREDGIKGNDGRTVSRKKQLLEKYKGVENIDELVAELQSDDVSDMRLRQERLYLYFRQLGKCMYTGKRIDLSQLNTDLYDVDHILPRTYIKDDSLDNKVLVLRSKNAEKSDSYPLPQGFTDQAPFWKLLLDKGLIGEKTYKRLTRTAPLTDDDYNDFINRQKTITDQTAKAVVELLKRKYPQAKVVFSKAKNVSDFKQRFDLHKCRETNDLHHARDAYLNIVVGNVYDACFTTPMAQFRKDGDVWRTYNLKTMFTRNVKGAWDENSLATVKKTYSKCSMSVTEYTYCGKGAFYNQTVYGAGDTSVTAPRKANGPLANTARYGGYKSQNTAYFAIVDSLGKKGVTQRTIEAIPVMVAYRATTDTNAVYNYLTDVLQLRNVKIVVPKVKKNQLVSYDGSLVRLTGVTGNRITANNARQLFTDNKTDEYVNQLLKLLEMDKNGLVDKNASEYVMKTNRMGDVKLVVDKAHNESLYDCFVEKLQKNEQDKVSLKYGNLSPFVTFGKNLQNGKEKFTNLTTLEQSYVIVQILRFFKCDAQTADIQLVGGSSMSGKVLFNKDITDVDFRLVDQSPCGLIVRTRKL

SEQ ID NO: 62 - protein, 1336 aa, synthetic construct
  REGION 1..1336: note = MG44-62 effector
MEKFYLGIDIGTNSVGMACTDENYDLLRAKGVDCWSVRLFDESKTAAERRTFRTARRRLERRKYRISLLQALFAPFIEDKTFFIRLNDSQLLPEDKNATLCGDKNNLFKDSGYTDKEFHTQFPTVYHLRKALLGDGDYDLRLYYLALHHIIKYRGHFLFEGSMSDIRNISNLFTALDMSVENVYGDDFFEFNPSLSESAKEILLDPKKRIHEKQSSLEKLFGAEEKEAKEMIKALCGAKISPSILFGEAFKETKSFSFKELNDEAFDAMASSYGDYYAVLEALRSIFSFITFEKLLAGHPDISSAMISVYEKHKADLRQLKDFLKAESPETYVKVFKSANEKHNYANYIGYTKKGGDKKKVTPCKDDEFYTYLKKTISAIEAKDEETKTKILFEIENGTFLPKILHSDNGLFPHQVNEDELVKIVANMAKSHPETNEIAEKILPLFRFRIPYYVGPLTGSKETSWVVKRSNEKITPWNFDEIVDKSASNEAFMRRMTNKCSYLHGENVLPKASVLYQKYNVLNQLNKIKINDKPLPNVEIKQKIFNELYLKYVKVTDKKIIDFLVRNGEISPEEAKTITLGGKDGEINASMSSYIQLKKILGEFVDSDIESGNGVCEKIILWHTLNTDKSVVENLILKNYGDILVIKSNIKALKGLSFKDFGRLSEKFLTGLRACDKETGEIVSVMDLLYNTNKNLNEILFDEIYNFGELIKAENGETSSEITYKDIEELYVSPAVRRGIWQSLVMADEYVKAIGKDPDKIFIEVTREDGVKGDAGRKLSRKKQLSEKYKAIKDGAYNDIITELNSEETTDMKLRQERLYLYFRQLGKCAYSGNQIDLSVLNTDRYDVDHILPRCYTKDDSIDNKVLVLRSCNADKKDKYPVPEKFRQPELWKLLLDKKLIEKKTFDRLMRTEPLGENDYNDFINRQKVFTDQTAKAVAELMKRKYPETKIVYSKAKNVSDFKTRFNLFKCRETNNLHHARDAYLNVVVGNVYDTCFSKPIDMFHRVGDEWREYNLDKMFTRNVKGAWDENSLAKVKATYGKCTMSVSQYAYCNKAEFYNQTVYPKGSSGITAPRKSSGALSDVAKYGGYMSQKTAYFAIVSSMNAKGNRIKTIEAVPVLTAYKLKNDPNALNDYFSSYLDSPEILIPKIKIRQLVSYNGTPVYIAGMTGNYIIVHNAVELFTDSKTDEYVNALLKLLKMSKEGPVEEENGGYPIKTNRYKDKKLVINSESNIALYEELKNKLKKPIYQGISAFKTYQDHLECGEEKFKVLSVLEQSEALIQILRFFKCNADYSDLTLIGRVKNATIVRFNNKITSADFKIISKSPAGLTERIKTV

SEQ ID NO: 63 - protein, 1376 aa, synthetic construct
  REGION 1..1376: note = MG44-63 effector
MEKFYLGIDVGTNSVGMACTDENYKLLRAKGQDLWSVRLFDEAKTAKERRTFRTARRRLERRKQRIKWLQELFAPYITDKNFFIRLNNSAFLTDDKDELLRRDKNSLFADDNFKDKNFFKEYSTIYHLRKALADGTADDLDLRFYYLALHHIIKYRGNFLYDGSLNDLGDASALFAELNAATIDFFGEEHMYFAPEKVAEAKRILISKSGLNDKKKALNELFDEKSFGTDIAPRFKEIITALCGGKFLPKKLFGDEYEEQKNFSLDEISDDDFEAKKAEFGDDEVAVLVAMRKIVNYAKFSKIIDGYFGCAAPLSEAMVALYNKHKADLKKLKDFIKTNGTNELYYKFFKSTEEKNNYVNYVGYTRKVGDKKKVEKCKEEEFFAYTKKFLIENFGKLCETENEQGKILKEMLASIESKSFLPKILHADKGLMPRQLNQAELNKIVENMQKRMPETKEIAEKIEKLFLYKIPYYVGPLSYAGTIKEKNGVAPGHWAVRNIGKENEKITPWNFDEVINKAASNREFMRRMTNKCTYLRGEDVLPKRSIIYQKFDVLNQLNKLRVNDKPISVELKNKIYNNLFLTKKKVTDKGIKDLLVREGIISEKERGQTELTGKDGEFKANMSSYITFCELFGKEFVDSDLEKSDSVCENIILWHTLNEDKKLVEQLILENYGKIPQIKSNIKVLKGLSFKEFGRLSKRFLTGIAIADKKTGEYVGGVLDVLENTNLNLNELLFDEKYSLAKTLAEENGETDSAVTFDDVNELYVSPAVKRGVWQAIKMADEYVSVLGRVPNKIFVEVTRENDPKKKGVRTFSRKDELLKKYRAMKNAEDYKDVIDALSGNETYDDMKLRSEKLFLYFCQLGRCAYTGERIDLSLLNSAYDVDHILPRTYIKDDSLDNKVLVKREKNATKDDDYPLPQGFTDQRPLWEFLKNAGLMSKTKFDRLTRVEPLNDDDYNYFINRQKVITDQTAKAVAELLQRKYPNTKIVYSKAGNVSDFRDKFSLFKCRETNDLHHARDAYLNVVVGNVYDVCFPSYINTMRKQEDEWRRRNLKNLFLRNREGAWVKDDDLSITSVKNTYGKHTMAVTRMATVGKGGFYNQTVYKKGDAGISVGRKGEGILADFEKYGGYSGLSTAYFAVVGSLDKKGNLKKTIEAVPVLIEYKAKNDKNAVINYFSEYIDSPKIIVPQIKTKQLIRYNGTPFYIAGGSRYDARILAYNASQLFTDNKTDEYFKAVKKLLDMNKEVKQKPESEEFVMKTNNEGVRKLVITRQSNIEKYDLLAAQLGKDFYQVLSPFRNVKKIIDEGKKKFCELLVIDQCYVLMQILSYLQCKGATADLQLIGGSGRSGQIRFNKDITNVDFRIYDTSSTGLFVKESKA

SEQ ID NO: 64 - protein, 1265 aa, synthetic construct
  REGION 1..1265: note = MG44-64 effector
MQELFAPFIDDKNFFIRLNNSQFLPEDKDEALFGDKNNLFNDPALDDKTFHGQFPTIYHLRKALLDGGDYDLRLYYLALHHIIKYRGHFLFEGSMNDIRNINRLFTALNDTLKNVYGDDEAPEFAATSAEKAKEILLDPKKNIRDKEQELEKLFGAESKLEKEIIKGMCGAKISPSVLFGESFKEEKSFSFKELTDETFDAMRQTYGDNFALPEALRAIYSFVTFEKLLVGKPDISSAMIAVYEKHKSDLKLLKDFLRAESGEIYGKVFKNTNEKANYVNYVGYTKKGGDKKKVKTCGYEEFRQYLKKTITAIDAKDKETQNLILSELENGSFLPKILHSDNGLFPHQVNEDELVKIADNMAKNHPETTDMAKKLRKLFLFRVPYFVGPLAGENSWAVRKTDEKVTPWNFDDVIDKAASNEEFMRRMTNHCSILHAEDVLPKCSMIYQKYNVLNQLNKLKINGCPLPSVELKQKIFNELFLKYNKVSDKKIIDLLVRSGEVSPEEARAITLTGKDGELNASMSSYITFKNILGDFADKPENAEILEKIILWHTLNTDKKIVEDLILKHFGKIPEIKNNVKALKGLVFKDFGRLSEKLLTGLKAADKETGELLSIIDILYETNQNLNEILANERYNFAELIKAENGEESDEIGYKDIEELYVSPAVRRGIWQSLIMADEYINAVGNVPDRIFIEFTRTDETKGEAGKKLSRKKQLSDKFKAIKDAEFQDIIAELNSDEITDMKLRQERLYLYFRQLGKCMYSGKNIDLSLLNTDTYDVDHILPRSYTKDDSLDNKALVLRDCNAKKTDIYPVPAEFRQVKLWKLLHEKELISKKTFDRLMRTEPLGEGDYEDFINRQKVITDQTAKAVAELLQKKYPTSQIVYSKAKNVVDFKNKFGLYKCRETNNLHHARDAYLNIVVGNVYHTCFSTPMAMFYKKDDGWRENNLKTMFTRNVKGAWDENSLQLVKSTFGKHTMAVSQYAFCYNGMFYDQTVYPKGDPGITSPRKGSGALADVEKYGGYKSQKTSYFAIVQSKGKKGQTIKTIEAVPVLTAYRQRTNPDALLDYFKTYLTEPTILIPKLKVRQLVSYNGTPVYIAGITGDYIIAHNANELFTDNKTDEYVNQLSKLVEMAKNGTISEENGEYIIKTNRNKDVKLTINRQSNIELYETLKNKLSKPSYQGLSPFSTFRKNLESGEEKFANLSVADQCTVLLQILKFFKCNAETADIVLIGGSGRSGCILFNKDVSKADFKIICKSPAGLTERIKKV

SEQ ID NO: 65 - protein, 1347 aa, synthetic construct
  REGION 1..1347: note = MG44-65 effector
MEKEQKFYLGLDIGTNSVGIACTDENYNLLRVKGKDCWAVRLFDEAQTAADRRAARTARRRLQRRRYRINQLQGLFAPFMQDNLFFLRLNNSQFFADDKAGELDGDVNNLFADSGFTDRNFHEKYPTIYHLRFALQQSPVDDIRLYYLALHHIIKYRGHFLYDGNVSEARDVHKLFDALNTVCENTFAENTPHFDIEKADEAKDMLLRSKGKLKDTVKSIKQLFSVQNDDCGKIRTEIINGFCGAKFSPEKLLGDAYSEEKSFAFRDVNEDAFEAMQSTYGDDFALLKAMREIYNFVTFERLFNGQPNISSAMIAVYDKHKSDLKKLKGFIKKNYDTDGGKKCREMFSDVTQKANYVNYVGHIGYGKSRKRVKTCDYDSFIAYVKKFLMDGNFAHDETYDEIMAEIEAKTFLPKILHSDNGLVPHQVNEDELVKIVAQMVRAFPETAQMASKILPLFLFRIPYYVGPLVGSNSWAVRKSDEKITPWNFRDVVDEAASNEEFMRRMTNKCTYLHGVDVLPKCSIAYQKFNTLNQINKLKVNDCAISVPLKQKIFAELFLVKPRVSDKMIASLIVREGAVAPGDSVVLSGKDGGDIKASMSSYIQLKRILGDFVDYDLASGGNVCENIILWHTLNTDKRLVEDLIVKNYGDNPAVVPYVKQLKGLVFNDFGKLSGRLLTELEVVDKQTGELCTVTDLLWNTNENFNELMFDKRYNLEEVIAAENNDDDGKVDYEDVRKLYVSPAVRRGIWQSLQMVDEYVAALGKEPDKVFVEVSREEGVKGDKGRTHSRKKQLLEKYKNINPKDVENIDELTGELNSDKISDMRLRQERLYLYFRQLGRCMYSGEPIDLDHINDSKLYDVDHILPRSYIKDDSLDNKVLVLRSKNAEKSDTYPLPLGFTNQQGWWKMLRAKDLISSGTYDRLMRTAPLTDDDYNDFINRQKVITDQTSKAVIELLKRKYPSATLVYSKAVNVADFKSKFDLYKCRETNDLHHARDAYLNVVVGNVYSTVFGVRIETYVKDGEKWKTYNLKKMFTRDVPGAWNENSIRTVKGVYNSSSMCVTRYAYCNKGAFYKQTVYSGNENITAPRKGKGPLANMERYGGYMTQSTAYFAIVESQGKKGRIKTIEAVPVMVDYQSRNDPDRVVKYFEENGLVDVKLIVPKIKIKQLVSYNGSRVWLAGITGPSIIVHNATELFTDNRTDMYVKQFVKLLEMAKNPTFDVNCEKYELTPNRERGEKITIDRESNIKLYDFFLSKFDCSKFKGVSSYVTFGKNLSIGREKFVALTVSQQVNVLNQIVNFFKCNAETADIELIGGSKISGKILFNKNITDVDFRIISQSPCGLTVHVKRV

SEQ ID NO: 66 - protein, 1334 aa, synthetic construct
  REGION 1..1334: note = MG44-66 effector
MKKFYIGADIGTNSVGVACTDESYRLIRAKSKDCWAVRLFDEGETAFDRRTKRTARRRLARRKQRINWLQELFEPFIDDKTFFIRLNNSQYLPEDKDSLLCGNKNNLFENEGEESKFYKKYPTIYHLRKALMDGGNFDIRLYYLALHHIIKYRGHFLYEGSIEDIRDFSNLMKGLDCAIADSYDGGLNLFDSVDSAKVRDILIDKKSGLRDKQVELEKLLCVKSKREKEILKGITGQKISPYVLFGDEFKEEKSFSLNDMSDEEFESKRSSYGESFTLLDLMHSVCNYVKFEKIFEGHSDISSAMISVYEKHKADLVLLKKVVRKQSKEDYNKIFRSVNEEKNYVNYIGYTSKDGRKIKVKKCKDEDFFKYLKKYLNGILNEDNFDIVSKIIKEIDDRIFLPKILHSDNGLFPKQVNEFELKKIIENMVRNYAETEEMASAVLSLFNYKIPYYVGPLTGCNSWVVRTDEKVTPWNFDRVVDLAKSNEAFMRRMTNKCAYIKGEDVLPKASIIYQKYDTLNQLNKLRINDRVISIELKQTIYNELFLKYPKVTDKKIKELLVREGLCSSSETKDITISGKDGDFKSSMSSYIRLKNILGDFVDDDLKSGGKVCENIILWHTLNTDKKIVEDLIEKNYGFIPEIKANIKQLKGLTFNDFGRLSAKLLIGIEGVDKTTGQILTILDVLYQTNQNLNEVLNNESYNFSEIIDEENGIETEIISYETVEELYVSPAVRRGIWQTLLMIDEYVNAVGRQPDKIFIEVTRNDGKKGDNGRTQPRKRQLQEKFKNIGSAYSDIIEELSEEKYTDLKLRQERLYLYFRQLGRCMYTGERIILDELNGNRYDVDHILPRTYVKDDSLDNKVLVCRGANATKADTYPLPTEFSRKEVRAHWKMLLDKDLISKTTYDRLTRIEPLKDDDYNDFINRQKTITDQTAKAVIELLKRKYPNAKLIFSRAKNVNDFKNRFNLFKCRETNDLHHARDAYLNVVVGNVFDSVFSTPLGQSRKDGDVWRIYNLKKLFTRDVIGVWSKDSIKIVKDTYSKPSMSVTRYATCNKGKFYDETVCRKDDSAITAPRKGKGPLSDVTKYGGYTTQKTAYFAIVTSVDKKGKSIKTIEAIPVLVTYKLKTDTNAIQKYLESYLREPIIVIPKVKVKQLVSYNGSLCYLAGTTDNRITVHNASQLYTDNTTDEYVNELIKIIGMSDNGIITGNESQYITKTNKDGVIRIVVNKENNEKLYETLKNKLDSKIYKGLSAFASFKTNMERGKDKFCELSVLEQAKVLLQILKVFRCNAEISDIQAIGGTAHSGKKLFAKNITDVDFKLVNLSPAGLTVRIRKV

SEQ ID NO: 67 - protein, 1305 aa, synthetic construct
  REGION 1..1305: note = MG44-67 effector
MKKFYIGADIGTNSVGVACTDESYRLIRAKSKDCWAVRLFDEGETAFDRRTKRTARRRLARRKQRINWLQELFEPFIDDKTFFIRLNNSQYLPEDKDSLLCGNKNNLFENEGEESKFYKKYPTIYHLRKALMDGGNFDIRLYYLALHHIIKYRGHFLYEGSIEDIRDFSNLMKGLDCAIADSYDGGLNLFDSVDSAKVRDILIDKKSGLRDKQVELEKLLCVKSKREKEILKGITGQKISPYVLFGDEFKEEKSFSLNDMSDEEFESKRSSYGESFTLLDLMHSVCNYVKFEKIFEGHSDISSAMISVYEKHKADLVLLKKVVRKQSKEDYNKIFRSVNEEKNYVNYIGYTSKDGRKIKVKKCKGEDFFKYLKKYLNGILNEDNFDIVSKIIKEIDDRIFLPKILHSDNGLFPKQVNEFELKKIIENMVRNYAETEEMASAVLSLFNYKIPYYVGPLTGCNSWVVRTDEKVTPWNFDRVVDLAKSNEAFMRRMTNKCAYIKGEDVLPKASIIYQKYDTLNQLNKLRINDRVISTELKQTIYNELFLKYPKVTDKKIKELLVREGLCSSSETKDITISGKDGDFKSSMSSYIRLKNILGDFVDDDLKSGGKVCENIILWHTLNTDKKIVEDLIEKNYGFIPEIKANIKQLKGLTFNDFGRLSAKLLIGIEGVDKTTGQILTILDVLYQTNQNLNEVLNNESYNFSEIIDEENGIETEIISYETVEELYVSPAVRRGIWQTLLMIDEYVNAVGRQPDKIFIEVTRNDGKKGDNGRTQPRKRQLQEKFKNIGSAYSDIIEELSEEKYTDLKLRQERLYLYFRQLGRCMYTGERIILDELNGNRYDVDHILPRTYVKDDSLDNKVLVCRGANATKADTYPLPTEFSRKEVRAHWKMLLDKDLISKTTYDRLTRIEPLKDDDYNDFINRQKTITDQTAKAVIELLKRKYPNAKLIFSRAKNVNDFKNRFNLFKCRETNDLHHARDAYLNVVVGNVFDSVFSTPLGQSRKDGDVWRIYNLKKLFTRDVIGVWSKDSIKIVKDTYSKPSMSVTRYATCKKRKFYDETVCRKNDSAITAPRKGKGPLSDVTKYGGYTTQKTAYFAIVTSVDKKGKSIKTIEAIPVLVTYKLKTDTNAIQKYLESYLREPIIVIPKVKVKQLVSYNGSLCYLAGTTDNRITVHNASQLYTDNTTDEYVNELIKIIGMGDNGIITGNESQYITKTNKDGVIRIVVNKENNEKLYETLKNKLDSKIYKGLSAFASFKTNMERGKDKFCKLSVLEQAKVLLQILKVFRCNAVNSNIELIGGGRGSGS

SEQ ID NO: 68 - protein, 1300 aa, synthetic construct
  REGION 1..1300: note = MG44-68 effector
MEKFYLGMDIGTNSVGMACTDENYKLLRAKGKDCWSVRLFDESKTALERRTYRTSRRRLQRRKYRLALLQELFAPFIDDKTFFIRLNNSQFLPEDKDGALFGDKNNLFNDPALDDKTFHGQFPTIYHLRKALIDGGDYDLRLYYLALHHIIKYRGHFLFEGSMNDIRNINRLFTALNDTLKNVYGDDEAPEFAATSAEKAKEILLDPKKNIRDKEQELEKLFGAESKLEKEIIKGMCGAKISPSVLFGESFKEEKSFSFKELTDETFEAMRQTYGDNFALPEALRAIYSFVTFEKLLVGKPDISSAMIAVYEKHKSDLKLLKDFLRAESGEIYGKVFKNTGEKANYVNYVGYTKKGGDKKKVKTCGYEEFRQYLKKTIAAIDAKNKETQNLILSELENGSFLPKILHSDNGLFPHQVNEDELVKIADNMAKNHPETTDMAKKLRKLFLFRVPYFVGPLAGENSWAVRKTDEKVTPWNFDDVIDKAASNEEFMRRMTNHCSILHAEDVLPKCSMIYQKYNVLNQLNKLKINDCPLPSVELKQKIFNELFLKYNKVSDKKIIDLLVRSGEVSPEEARAITLTGKDGELNASMSSYITFKNILGDFADKPENAEILEKIILWHTLNTDKKIVEDLILKHFGKIPEIKNNVKALKGLVFKDFGRLSEKLLTGLKAADRETGELLSITDILYETNQNLNEILANERYNFAELIKAGNGEESDEIGYKDIEELYVSPAVRRGIWQSLIMADEYINAVGKVPDRIFIEFTRTDETKGEAGKKLSRKKQLSDKFKAIKDAEFQDIIAELNSDEITDMKLRQERLYLYFRQLGKCMYSGNPIDLSALDTDMYDVDHILPRSYTKDDSLDNKVLVFRTCNAKKTDIYPVPAEFRQVKLWKLLHEKELISKKTFDRLMRTEPLGEGDYEDFINRQKVITDQTAKAVAELLQKKYPTSQIVYSKAKNVVDFKNKFDLYKCRETNNLHHARDAYLNIVVGNVYHTCFSTPMAMFYKKDDGWRENNLKTMFTRNVKGAWDENSLQLVQSTFKKHTMAVSQYAFCYNGMFYDQTVYPKGDPGITAPRKGRGALADGEKYGGYKSQKTSYFAIVQSKGKKGQTIKTIEAVPVLTAYRQRTNPDALPDYFKTYLTEPTILIPKLKVHQLVSYNGTPVYIAGITGDYIIAHNANELFTDNKTDEYVNQLSKLVEMAKNGTISEENGEYIIKTNRNKDVKLTINRQSNIELYDTLKNKLSKPSYQGLSPFSTFRKNLESGEEKFANLSVTDQCTVLFQIEFYDCAWRKRKTYLAASDCV

SEQ ID NO: 69 - protein, 1337 aa, synthetic construct
  REGION 1..1337: note = MG44-69 effector
MEKFYIGTDIGTNSAGVACTDENYNLLRVKGKDCWAVRLFDEGKTALHRRTFRTGRRRLQRRKQRIAWLQDLFAPYMEDETFFIRLNNSQFLPEDKDALLGGDKNTLFAGVYDDKKFHTEFPTVYHLREALMRGGVNDLRLYYLALHHIVKYRGHFLTEGSVDDVRDFGRLLGNLNGVISDVYGDEVPLFSEAAVDEVKNILLDKTLGIKDRSTELEKIFGVKDKTSKEIIKGLCGGKISPAVLFGDEYKEEKSFSFKEMTDDNFESMRGTYGDNFTVLEVIRSIYGYVIIENLLSGHDDLSSAMMDVYDKHKKDLLALKAFIRSERPEDYNKIFKSTDEKYNYVNYIGYTKKGGDKKKVKKCKDDEFYAYIKKYLQGLTDVKDIAARDKFLKDIEAGSFMQKILHSDNGLFPKQINEYELKKILDNMVKSFPATAEIKDKIVTLFNYRIPYYVGPLAGKEETCWAVKKSNEKITPWNFDDVIDKAKSNEKFMLRMTNKCSYLRGEDVLPKASIIYQKFDTLNQLNKLRVNDELLTVDLKQKIFNELFLKYPKVSDKKIIDLLVREGKISQNDRSEVTLSGKDGEFKASMSSYIHLKNILGDFVDKDLSENGGVCENIILWHTLNTDKNIVVDLIKENYGKIPEIKNAIKQLKGLVFHDFGRLSRKLLCEIYTVKEDTGELWNVLDALYETNENLNELLNDGRFSFGKNIKEENGEMTADVGYKDVEELYVSPAVRRGIWQTLTVVDEYVKAIGKAPDKIFVEVTREDGIKGDAGRTQSRKRRLQEKFRTVSDAYADVIAELGEERFTDLKLRQERLFLYFRQLGRCMYTGERIDLNSINDVTRYDVDHILPRTFIKDDSLDNKVLVLRSKNAKKSDTYPLPAGFSNQRDFWKMLLDKGLIAKVTYDRLTRTEPLREDEYQDFINRQKVITDQTVKVVAELFKRRYPTAKIVYSKAKNVNDFKQKFDLFKCRETNDLHHARDAYLNVVVGNVYDTVFTTPMSMYRKDGDVWRTYNLNKLFTRDVKGVWDNAQSIATVKKVYSKNSMVVTRYATCNSGGFYNATVYSKDEKGITAPRKGKGPLSDSSKYGGYMTQPTAYFAIVLSKDKNGNEIKTIEAVPVLTAYMARIDPKAVERYFSERLKDAKIIVPKIKIKQLASYNGTLCCLAGITDNRILVHNAVQLFTDGKTDEYVNSLLKLADMKAKGIINVGQEEFVMKTNRDGERKLVIDRANNADLYGMLKRKLERENYAGLSAFATFRKNLEKGEEKFNSLTVYEQTVVLLQVLKFFKCNAETADTTLVGGSAKSGSIKFNNNITNVDFRLIDLSPAGLTERVRKV

SEQ ID NO: 70 - protein, 1416 aa, synthetic construct
  REGION 1..1416: note = MG44-70 effector
MEEIYLGLDIGTNSCGYAVTDGNYNLVRIGGKDAWGVRLFEEAETAQERRAKRTARRRIVRKKLQNLWLQQLFEKEIEKVDPSFFTRLKYSNLNLEDKILSDKNLTSKYSLFNDTVKRVFTDKEYYAKYETVYRLRKELLSSPAEDVRLLYLAIHSILTHRGHFLSETDFSSNVPIEDSYNCLLDKLSAYSVEFNDSKNGLTIKPDKISGIFLLLEDFAQGLPFRQVKENFEKNLDVKTKLDKTVASILLSGKFKTTDVFAVEKEDAVKVDFNDEKFEEVYGTLSGQLSETELAILNLLKDIYSNIQLKKLLGKNNYICEAMVERYDKHNEQLKELKTFVKTYFPSKKNLVFNAQKTSKKKKEEKSGKIANYAAYCYSDLKDGKKQIIDGVASREDFYKFIKNELLECSPEVETDLNKFEEQKQKILNSIEKNDYLLKIRSHDNIVLPNSLYKVELQQILKINEKKFKFLSEKDEKGKTISEKIIDIICFRIPYFVGPIGQSERGWIRKDKNLDFKPWTLNEIINFDEAEDKFIQNMTSKCTYLPTEDVLPKDSLLYSKFRVLNELNNLKVNGNDITVETKQRIFKGLFEKYKKISKNKLIEFLKQENIYPKNESIVITGIDNEFANNYSSYVTLANKFGEEFVNKNYDVFEKIIKYHTIISDKLRLEKRIKREFKIFSNEDVKFLKSLNYSGWGKLSGKFLNGIKFADKKSNSPEFESKTIISAMWETNKNLQEVIFCKEYNLLEKLEANIEKIQRDLVYEDVQNMYTSPSVKRGTWQAISIINELKSKLGKYPDKIFIEVTRNDQEKGDKGRKDSRFGAVVKKYKDKTLKEDCLKEAINYNNLLDELNKRNNSHLRSEKLFLYFMQLGKDAYTGEPIDIAELGNDNAYNVDHIIPRSKVKDDSLDNKVLVSAAANLAKGDEYPLKRKIQFAQKDFWRMLNKNGLMSDKKLARLERTEEFTDKDADDFTNQQLVSTNQESKAVIDLLSKVYDNRRNIVFSKAMFVTEFRNRYNIFKSRDVNDLHHAKDAFLNVVVGNVLFNRFTQGYWKKDKNIKILEDENRVDADEDKNEKVTSVVDKVFGRYVWSNQTGEVVWKGWKDVERIQKICYQNSPVISIMPYVNRNGAFYDETIYKKKNDGEKFKAAFALKEKGPMSSIEKYGGFNSVNNAYFMVVESVDNKGRIKKTIECVPIIVEYKYRNDPDKKQKIIKFIEETNNIKITRVIKDELKFRSVLKINGGLYMLTAKTSDSFKVLKLNQWYISNSDTGYIKILEKYKNMPQVAKECLKEDGERLIVSPAVKENSRPQIITRTQNVELYDLIINQLSKKIYDLSSIKAIVSNLKDKRDLFIALSIPNQTEVLLNLVKYVGGGYLADLKLLGGTEHMGTTRISKDITDLNIYLIEQSVTGLYSKGTKL

SEQ ID NO: 71 - protein, 1337 aa, synthetic construct
  REGION 1..1337: note = MG44-71 effector
MEKFYIGTDIGTNSAGVACTDENYNLLRVKGKDCWAVRLFDEGKTAVDRRTFRTGRRRLQRRKQRIAWLQDLFAPYMEDETFFIRLNNSQFLPEDKDALLGGDKNTLFAGVYDDKKFHTEFPTVYHLREALMRGGVNDLRLYYLALHHIVKYRGHFLTEGSVDDVRDFGRLLGNLNGVISDVYGDEVPLFSEASSSEVKNILLDKTLGIKDRSTELEKIFGVKDKTSKEIIKGLCGGKISPAVLFGDEYKEEKSFSFKEITDENFEGMRATYGDDFALLEGIRSVYGYVTFEKLLSDHTDLSSAMMDVYDKHKKDLLALKAFIRSERPEDYNKIFKSTDEKYNYVNYIGYTKKGGDKKKVKKCKDDEFYAYIKKYLQGLTDVKDIAARDKFLKDIEAGSFMQKILHSDNGLFPKQINEYELKKILENMVKSFPATAEIKDKIVTLFNYRIPYYVGPLAGKEETCWAVKKSNEKITPWNFDDVIDKAKSNEKFMLRMTNKCSYLRGEDVLPKASIIYQKFDTLNQLNKLRVNDELLTVDLKQKIFNELFLKYPKVSDKKIIDLLVREGKISQNDRSEVTLSGKDGEFKASMSSYIHLKNILGDFVDKDLSENGGVCENIILWHTLNTDKNIVVDLIKENYGKIPEIKNTIKQLKGLVFHDFGRLSRKLLCEIYTVKEDTGELWNVLDALYETNENLNELLNDEKFSFGRNIKEENGEMTSDVGYKDVEELYVSPAVRRGIWQTLTVVDEYVKAIGKAPDKIFVEVTREDGIKGDAGRTQSRKRRLQEKFRTVSDAYADVIAELGEERFTDLKLRQERLFLYFRQLGRCMYTGERIDLNNINDITRYDVDHILPRTFIKDDSLDNKVLVLRSKNAKKSDTYPLPAGFSNQRDFWKMLLDKGLIAKVTYDRLTRTEPLREDEYQDFINRQKVITDQTVKVVAELFKRRYPTAKIVYSKAKNVNDFKQKFDLFKCRETNDLHHARDAYLNVVVGNVYDTVFTTPMSMYRKDGDVWRTYNLNKLFTRDVKGAWDNAQSIATVKKVYSKNSMVVTRYATCNNGGFYNATVYSKDEKGITAPRKGKGPLSDSSKYGGYMTQPTAYFAIVSSKDKNGNEIKTIEAVPVLTAYVARTDPKAVEKYFTGRLKDAKIIVPKIKIKQLASYNGTLCCLAGTTDNRILVHNAVELFTDGKTDEYVNSQLKLADMKAKGIINVGQEEFVMKTNRDGERKLVIDRANNADLYDMLKRKLERENYAGLSAFATFRKNLEKGEEKFNSLTVYEQTVVLLQILKFFKCNAETADTTLVGGSAKSGSIKFNNNITNVDFRLIDLSPAGLTERVRKV

SEQ ID NO: 72 - protein, 1337 aa, synthetic construct
  REGION 1..1337: note = MG44-72 effector
MEKFYIGTDIGTNSAGVACTDENYNLLRAKGKDCWAVRLFDEGKTAVDRRTFRTGRRRLQRRKQRIAWLQDLFAPYMEDETFFIRLNNSQFLPEDKDALLGGDKNTLFAGVYDDKKFHTEFPTVYHLREALMRGGVNDLRLYYLALHHIVKYRGHFLTEGSVDDVRDFGRLLGNLNGVISDVYGDEVPLFSEAAVDEAKNVLLDKTLGIKDRSTELEKIFDVKDKTSKEIIKGLCGGKISPAVLFGDEYKEEKSFSFKEITDENFEGMRATYGDDFALLEGIRSVYGYVTFEKLLSDHTDLSSAMMDVYDKHKKDLLALKAFIRSERPEDYNKIFKSTDEKSNYVNYIGYTKKGGDKKKVKKCKDDEFYAYIKKYLQGLTDVKDIAARDKFLKDIEAGSFMQKILHSDNGLFPKQINEYELKKILENMVKSFPATAEIKDKIVTLFNYKIPYYVGPLAGKEETCWAVKKSNEKITPWNFDDAIDKAKSNEKFMLRMTNKCSYLRGEDVLPKASIIYQKFDTLNQLNKLRVNDELLTVDLKQKIFNELFLKYPKVSDKKIIDLLVREGKISQNDRSEVTLSGKDGEFKASMSSYIHLKNILGDFVDKDLSENGGVCENIILWHTLNTDKNIVVDLIKENYGKIPEIKNAIKQLKGLVFHDFGRLSRKLLCEIYTVKEDTGELWNVLDALYETNENLNELLNDEKFSFGRNIKEENGEMTSDVGYKDVEELYVSPAVRRGIWQTLTVVDEYVKAIGKAPDKIFVEVTREDGIKGDAGRTQSRKRRLQEKFRTVSDAYADVIAELGEERFTDLKLRQERLFLYFRQLGRCMYTGERIDLNNINDVTRYDVDHILPRTFIKDDSLDNKVLVLRSKNAKKSDTYPLPAGFSNQRDFWKMLLDKGLIAKVTYDRLTRTEPLREDEYQDFINRQKVITDQTVKVVAELFKRRYHTAKIVYSKAKNVNDFKQKFDLFKCRETNDLHHARDAYLNVVVGNVYDTVFTTPMSMYRKDGDVWRTYNLNKLFTRDVKGAWDNAQSIATVKKVYAKNSMIVTRYATCNNGGFYNATVYSKDEKGITAPRKGKGPLSDSSKYGGYMTQPTAYFAVVSSKDKNGNEIKTIEAVPVLTAYVAKNDPKAVEKYFTGRLKNAKIIVPKIKIKQLASYNGTLCCLAGTTDNRILVHNAVELFTDGKTDEYVNSLLKLADMKAKGIINVGQEEFVMKTNRDGERKLVIDRANNADLYDMLKRKLERENYAGLSAFATFRKNLEKGEEKFNSLTVYEQTVVLLQILKFFKCNAETADTTLVGGSAKSGSIKFNNNITNVDFRLIDLSPAGLTERVRKV

SEQ ID NO: 73 - protein, 1420 aa, synthetic construct
  REGION 1..1420: note = MG44-73 effector
MSNYNNFKKYGDYYIGLDVGTGSCGWAVTDTSYNILKVSGKSLWGVRLFPTADTAAERRSHRCARRRVFRNRQRLNLLEQLFDSEISKVDVGFFQRLKNSEFKEISKNNLFGDCTYNDKDFFKEYPTIYHLRYKLMNEPIDDIRLLFLAVHHIIKHRGHFLFDNVNNIGASLPELWEQCCSQFVDISLFSNLSEDYLDIAESLKQNLIDMRDDVINVIKTSSDKKADLNKVFAQLKSVYDEISDYEVKKTIENRVNKWSLLLLGYKVSAVEIFSIDESDEEGISCKIQINSSDYDEQLLKIKDEFKGVVESEKAVYDVIKLQEILKGCKSISEAKVKLYNKHAEELRIFKNLLRERLSEKILIEVNKNVKVANNEKLTSDPKSFYKEIFEERNKNTEKGKICFYYDITHGDKSANKEAIKGSSIYKRLQILAQILLCSSKIYKLSEKEKVLLHRIGDLSIFETQVSADNSVIPYQINLAELDKILKVQSKNFAFLSEKDDAGVLVYDKIKALLTFRIPYYVGPLNNHSKFSWIVKKSQEKIVPWNFESVVDTEKSAEAFIKRMTSKCTYLSGEDVLPKNSIIYSKFMVLNVLNNIRINGMRLDEAQTGLTKKVFDELYCNQINVTQKQLVAYLYNNGFLTSKEELTGFDDEQKVSMSSYVKIKNALGTDNFDINFAESFIKYSTLFPNDYLMIEKRLKREFSSECAKFNEKLSKLCRIKFSGWGRLSEKLLIGLIGYNKNSEFDKNSILGFMLNGKGNLMELLSSEYTFSDLISSENSTLDENNAFSYQNLVEGLYVSPSVKRMIWQTLLVVREITKKIMGYEPSRIFVEMARGATADQKGKRTNSRKKSILALYDKCRQDFDISDLSSKLENEKDSKLLSDKIYLYYTQLGKSVYTGKEIKIDEFDLYDIDHIIPQSLTKDDSLDNRVLVEKEINQNDKKNRYPLSSEIQENQKQFWKHLLDLGLISKSKFERLIRSKPLSNSEKEGFIARQLVETRQSTKAIAGLLSKLYKTAKIIYPKAGLTADFKQRFDLIKVRELNDLHHAKDAYCNIVVGNVYYEKFTSNYLYVIENNEPYSFSTSDKSYIFTKQNEKRLRETGTWDSRNGKSISIVKKYYKRNNILMTYKQEERIGALFNQTLYGPEKGTIPKKKNMSCQDYGGYDSDQNSFFSFISYKDDKANLKTKLIGIPLRVVYGLSDKASAISHYLLTEKANEYREPKVLIDFLPFNFILKDNETGFLARVVSFASKGKQLEIKQFNPLVLDEKNLKPLKAIEKFVSRLKNKSIKIKYEKDKSGFTDEDLSSIYSELKDKSKNSVFKNLPKPIVKMLSDVDINNYKYQESEKSEPKLLTIEQKAVAICELIKAFHTESSNLLFLGEKKGSGVKRIKTVLDLEKTDYSILCSSITGFYEKEIRLRDLLK

SEQ ID NO: 74 - protein, 1336 aa, synthetic construct
  REGION 1..1336: note = MG44-74 effector
MEKFYIGADIGTNSVGIACTDENYNLLRIKGKDCWTVRLFDECKTAEERRGFRTSRRRTARRKQRINFLQSLFAPYMNDKTFFIRLNNSQFLPEDKSELLHGDKNTLFSGDYDDKKFHAEFPTIYHLRDKLMSGGICDLRLYYLALHHIIKYRGHFLFEGSMEDVRDLGKLLNALNDAMVGVYGDELSLFDKSVAEEAKSVLLDDKLKIRDKQIGLEKVFRVDDKIRKEIIKGLCGGKISPSILFGDEYKDEKNFSFKEISDEIFESMRDTYGDDFGLLCAIRSVYGFVTFEKLLEGHSSLSAAMIAVYEKHKNDLKRLKSFIKSERPEDYNKIFKSTEEKCNYVNYVGYTKKGGDKKKVKKCKDDEFYAYLKKYLSGLDDVKDAETRNAIIEEIEDGKFLPKILHSDNGLFPRQINESELNKIVGNMVKAYPETADVEEKILTLFRFRIPYYVGPLSGENSWAVRKSDDKITPWNFYDVIDAAKSNEEFMRRMTNKCAYLQGEDVLPKASVLYQKFDTLNQLNKLRVNDEIISVELKKKIYNELFLVYPKVSDKKIKELLVREGRISPSDVNDTVLSGKDGEFKASMSSYIRLKKILGDFVDKDLSENGGVIENIILWHTLNTDKSIVENLIKSNYGKIPEIKNALPQLKGLTFNDFGRLSAKLLSGIYTVIAETGELRNIIDTLYETNENLNEILNDERYEFGRIINEENGQADEEVTYETVKKLYVSPAVRRGIWQAMSVTDEYVRAIGRAPDKIFIEVTRTDGKKGDAGRTQPRKRRLQEKFKALCNDGAFDDIIAELDDEKYTDMRLRQERLYLYFRQLGRCMYTGQRISLDDINDTNLYDVDHILPRTFIKDDSLDNKVLVLRSKNAQKSDTYPLPAGFSDQRGFWKLLLDKGLIEKVTYDRLTRTEPLREDEYRDFINRQKVITDQTVKAVAELMRRKYPTAKIVYSKAKNVSDFRKKFKLFKCRETNDLHHARDAYLNVVVGNVYDTVFSTPMAMFRKDGDVWRNYNLKKLFTREVKFAWNESSIAIVKKTYARPSMTVTRYAMCAKGGFYDQTIYGKGDIGITSPRKANGPLSDMSKYGGYKSQSTAYFAIVSSTDKKGNKIKTIEAVPVLTAYQAKTDNKAVEKYFADRLSTPEIIVPKLKIKQLISFNGTPCYLAGITGTRIIAHSAVQLFTDNKTDDYVNSLLNLEDMKSKKAVNVGDDKFLMKTDHTGAEKLVIDKATNIALYRDLMRRLGLKIYSGISAFATFAKNMKSGEDKFISLTVCDQATVLLQILKFFKCNAETSDITLIGGSGKSGTVLLNKNITDVDFEIINLSPAGLIERVRKV

SEQ ID NO: 75 - protein, 1420 aa, synthetic construct
  REGION 1..1420: note = MG44-75 effector
MSNYDNYRKYGDYYIGLDVGTGSCGWAVTDKSYNILKVSGKSLWGVRLFPTADTAAERRSHRCARRRVFRTRQRLNLLEQLFDPEISKVDVGFFQRLKNSEFKEISKNNLFGDNSYKDKDFFKEYPTIYHLRYKLMNEPVDDIRLLFLAVHHIIKHRGHFLFERLDVNNIGASLPELWEQCCSQFVDISLFSNVSDDFQEIADSLKQNLIDMRDDVINVIRTSSDKRSDLKKVFAQFKSVYDEISDPEVKKSTENKVNRWYLLLLGYKVSAAEIFTIEESDEEGLSCKIKFNSSDYDEQIQKINDEFKGVVESEKAVYDVIKLQEILKDCNSISESKVELFNKHAEELRIFKSLLRERLSESLLAEVNKKVNVAKNEKLTTEPKSFYKEIFEERNKNTEKGKICFYYDITHGDKSANKEAIKGSSIYKRLQILAQILLCSSEINKLSEKEKVLLHRIGDLSIFETQVSADNSVIPYQINLAELDKILKVQSKNFAFLSEKDDAGVSVYDKIKALLTFRIPYYVGPLNNHSKFSWIVKKSQEKIVPWNFESVVDTEKSAEAFIKRMTSKCTYLSGEDVLPKNSIIYSKFMVLNVLNNIRINGMRLDEAQTGLTKKVFDELYCNQINVTQKQLVAYLYNNGFLTSKEELTGFDDEQKVSMSSYVKIKNALGTDNFDINFAESFIKYSTLFPNDYLMIEKRLKREFSSECAKFNENLSKLCRIKFSGWGRLSEKLLTGLLGHNKNSEFDKNSILGFMLNGKGNLMELLSSEYTFSDLISSENSTLDKNDAFSYQNLVEGLYVSPSVKRMIWQTLLVVREITKKIMGYEPSRIFVEMARGATADQKGKRTNSRKKSILALYDKCRKDFDISEIYSSLEKQDDNKLLSDKIYLYYTQLGKSMYTGNKIELEDLLNNSKQYDIDHIIPQSLTKDDSIDNRVLVERTVNEEKDNNYPLSYQIRENQTQFWKHLLDLGLISKSKFERLIRSTSLSNSEKEGFIARQLVETRQSTKAIAGLLSKLYKKAKIIYPKAGLTADFKQKFDLIKVRELNDLHHAKDAYCNIVVGNVYFEKFTSKYQYVIANNERYSFSTSDTSYIFTNQNEKRLQQSGIWDSRNGCSISVVRKNYYRNNILKTIKQEEVKGKLFDLTLYGPSKATIKKKKHLGCEYGGYDKDYNTFFSFISFISKKKKIYRFIGIPLRIVENSNNIHDSIVQYLLDEKFENPQILIEKLPFPFILKNNETGFLYKVSSYEKANKRITLQQFNSLILSIRSQKILKAIESFERKVKLNDKKVNFVYDEKKSGFSEQDLTNLFSELKSKVENTFFNCLPAVITNVLKNIDLQTYRVKEKDSDERLLTIEQKVHVVVELLKAFQSNGASSDLHDIGESKNSGIVRTTELDFEKYSIINYSVTGFYFIETKLRDLIK

SEQ ID NO: 76 - protein, 1337 aa, synthetic construct
  REGION 1..1337: note = MG44-76 effector
MEKFYIGTDIGTNSAGVACTDENYNLLRAKGKDCWAVRLFDEGKTAVDRRTFRTGRRRLQRRKQRIAWLQDLFAPYMEDETFFIRLNNSQFLPEDKDALLGGDKNTLFAGVYDDKKFHTEFPTVYHLREALMRGGVNDLRLYYLALHHIVKYRGHFLTEGSVDDVRDFGRLLGNLNGVISDVYGDEVPLFSEASSSEVKNILLDKTLGIKDRSTELEKIFGVKDKTSKEIIKGLCGGKISPAVLFGDEYKEEKSFSFKEITDENFEGMRATYGDDFALLEGIRSVYGYVTFEKLLSDHTDLSSAMMDVYDKHKKDLLALKAFIRSERPEDYNKIFKSTDEKYNYVNYIGYTKKGGDKKKVKKCKDDEFYAYIKKYLQGLTDVKDIAARDKFLKDIEAGSFMQKILHSDNGLFPKQINEYELKKILENMVKSFPATAEIKDKIVTLFNYRIPYYVGPLAGKEETCWAVKKSNEKITPWNFDDVIDKAKSNEKFMLRMTNKCSYLRGEDVLPKASIIYQKFDTLNQLNKLRVNDELLTVDLKQKIFNELFLKYPKVSDKKIIDLLVREGKISQNDRSEVTLSGKDGEFKASMSSYIHLKNILGDFVDKDLSENGGVCENIILWHTLNTDKNIVVDLIKENYGKIPEIKNAIKQLKGLVFHDFGRLSRKLLCEIYTVKEDTGELWNVLDALYETNENLNELLNDEKFSFGRNIKEENGEMTSDVGYKDVEELYVSPAVRRGIWQTLTVVDEYVKAIGKAPDKIFVEVTREDGIKGDAGRTQSRKHRLQEKFRTVSDAYADVIAELGEERFTDLKLRQERLFLYFRQLGRCMYTGERIDLNNINDITRYDVDHILPRTFIKDDSLDNKVLVLRSKNAKKSDTYPLPAGFSNQRDFWKMLLDKGLIAKVTYDRLTRTEPLREDEYQDFINRQKVITDQTVKVVAELFKRRYPTAKIVYSKAKNVNDFKQKFDLFKCRETNDLHHARDAYLNVVVGNVYDTVFTTPMSMYRKDGDVWRTYNLNKLFTRDVKGAWDNAQSIATVKKVYSKNSMVVTRYATCNSGGFYNATVYSKDEKGITAPRKGKGPLSDSSKYGGYMTQPTAYFAVVSSKDKNGNEIKTIEAVPVLTAYMARIDPKAVEKYFTGRLKDAKIIVPKIKIKQLASYNGTLCCLAGTTDNRILVHNAVELFTDGKTDEYVNSLLKLADMKAKGVINVGQEEFVMKTNRDGERKLVIDRANNADLYDMLKRKLERENYAGLSAFATFRKNLEKGEEKFNSLTVYEQTVVLLQILKFFKCNAETADTTLVGGSAKSGSIKFNNNITNVDFRLIDLSPAGLTERVRKV

SEQ ID NO: 77 - protein, 1337 aa, synthetic construct
  REGION 1..1337: note = MG44-77 effector
MEKFYIGTDIGTNSAGVACTDENYNLLRVKGKDCWAVRLFEEGKTAVDRRTFRTGRRRLQRRKQRIAWLQDLFAPYMEDETFFIRLNNSQFLPEDKDALLGGDKNTLFAGVYDDKKFHTEFPTVYHLREALMRGGVNDLRLYYLALHHIVKYRGHFLTEGSVDEVRDFGRLLGNLNGVISDVYGDEVPLFSEASLSEVKNILLDKTLGIKDRSTELEKIFGVKDKTSKEIIKGMCGGKISPAVLFGDEYKEEKSFSFKEITDENFEGMRATYGDDFALLEGIRSVYGYVTFEKLLSDHTDLSSAMMDVYDKHKKDLLALKAFIRSERSEDYNKIFKSTDEKYNYVNYIGYTKKGGDKKKVKKCKDDEFYAYIKKYLQGLTDVKDIAARDKFLKDIEAGSFMQKILHSDNGLFPKQINEYELKKILENMVKSFPATAEIKDKIVTLFNYKIPYYVGPLAGKEETCWAVKKSNEKITPWNFDDVIDKAKSNEKFMLRMTNKCSYLRGEDVLPKASIIYQKFDTLNQLNKLRVNDELLTVDLKQKIFNELFLKYPKVSDKKIIDLLVREGKISQNDRSEVTLSGKDGEFKASMSSYIHLKNILGDFVDKDLSENGGVCENIILWHTLNTDKNIVVDLIKENYGKIPEIKNAIKQLKGLGFHDFGRLSRKLLCEIYTVKEDTGELWNVLDALYETNENLNELLNDEKFSFGRNIKEENGEMTSDVGYKDVEELYVSPAVRRGIWQTLTVVDEYVKAIGKAPDKIFVEVTREDGIKGDAGRTQSRKRRLQEKFRTVSDAYADVIAELGEERFTDLKLRQERLFLYFRQLGRCMYTGERIDLNSINDVTRYDVDHILPRTFIKDDSLDNKVLVLRSKNAKKSDTYPLPAGFSNQRDFWKMLLDKGLIAKVTYDRLTRTEPLREDEYQDFINRQKVITDQTVKIVAELFKRRYPTAKIVYSKAKNVNDFKQKFDLFKCRETNDLHHARDAYLNVVVGNVYDTVFATPMSMYRKDGDVWRTYNLNKLFTRDVKGAWDNAQSIATVKKVYSKNSMVVTRYATCNSGGFYNATVYSKDEKGITAPRKGKGPLSESSKYGGYMTQPTAYFAVVSSKDKNGNEIKTIEAVPVLTAYMAKNDPKAVERYFSERLKDAKIIVPKIKIKQLASYNGTLCCLAGITDNRILVHNAVQLFTDGKTDEYVNSLLKLADMKAKGIINVGQEEFVMKTNRDGERKLVIDRANNADLYGMLKRKLERENYAGLSAFATFRKNLEKGEEKFNSLTVYEQTVVLLQILKFFKCNAETADTTLVGGSAKSGSIKFNNNITNVDFRLIGLSPAGLTERVRRV

SEQ ID NO: 78 - protein, 1336 aa, synthetic construct
  REGION 1..1336: note = MG44-78 effector
MNKKDFYVGLDIGTNSVGIACTDQDYNLRRSNGKDCWAVRLFDTANTAAERRVFRTARRRLQRRKYRLGQLQALFASNIADDKFFIRLNNSQFFVDDKDECLSADKNTLFADSGYTDKEFHEAFPTIYHLRLALQNGHASDIRLYYLALHHIVKYRGHFLFEGSVGDIRDIKKLFVDLNTACEAVYADEVPYFDTQLCEQAKNTLMKPSGIRDKQKALDALFGGTSKAQSEIIKAMCGGKLAPKTMFEGRYEEEKSFSLSEMQDEAFDALAEVFGDDFVLLQALRNLCNFVKFEKLFAGQPNISSAMIAVYDKHAADLAMLKIFLKTYAPQMYNKVFRSVTESANYVNYVGYNKKKSAKTKVAPCKYEDFLAFVKKIVAAVDCADTELRDKILAEIDNKTFLPKILHADNGLIPHQVNEDELVKIVKSMTEAFPETQAMAKQILPLFRFRIPYYVGPLVGENSWAVRKSDERITPWNFNEVIDLAASNEQFMRRMTNKCTYLHGEDVLPKCSIVYQKFNTLNQINKLQVDGRAISVELKKKIFDQLFLAKSKVSDKMIVDLLVREGVVSPQERTQAVLSGKDGEVKASMSSYIQLKRILGDFVDEDISSGGNVCENIILWHTLNTDKSIVEDLLRRNYGDNPHITPYIKQLKGLMFADFGRLSDKLLTGLRTVDKSTGELCSILDLLYDTNQNFNEIIFDERYDFAELIRKENSGESTEITYEEDIATMRVSPALKRGIWQSLQLVDEYVAALGGSPDKIFVEVTREDGVKGNDGRTVSRKKQLLEKYKGVEGIDELVAELQSDDVSDMRLRQEKLYLYFRQLGRCMYTGKRIDLSQLNTDLYDVDHILPRTYIKDDSLDNKVLVLRSKNAEKSDAYPLPQGFSNQAPFWKLLLDKGLIGEKTYKRLTRTAPLTDDDYNDFINRQKTITDQTAKAVVELLKRKYPQAKVVFSKAKNVSDFKQKFDLHKCRETNDLHHARDAYLNIVVGNVYDACFTTPMAQFRKDGDVWRTYNLKTMFTRNVKGAWDENSLATVKKTYSKCSMSVTEYTYCGKGAFYNQTVYGAGDTSVTAPRKANGPLANTARYGGYKSQNTAYFAIVDSLGKKGVTQRTIEAIPVMVAYRATTDTNAVYDYLTNTLQLRDVKVVVPKVKKNQLVSYNGSLVRLTGVTGNRITANNARQLFTDNRTDEYVNQLLKLLEMDKNGLVDKNASEYVMKTNRMGDVKLVVDKAHNENLYNCFVEKLQGGKYGKLSSFVTFGKNLQSGKEKFTNLTTLEQSYVIVQILRFFKCDGQEADIRLIGGSEQSGSIKFGNGITDVDFRLVDQSPCGLTVRTRKL

SEQ ID NO: 79 - protein, 1337 aa, synthetic construct
  REGION 1..1337: note = MG44-79 effector
MEKFYIGTDIGTNSAGVACTDENYNLLRVKGKDCWAVRLFDEGKTAVDRRTFRTGRRRLQRRKQRIAWLQDLFAPYMEDETFFIRLNNSQFLPEDKDALLGGDKNTLFAGVYDDKKFHTEFPTVYHLREALMRGGVNDLRLYYLALHHIVKYRGHFLTEGSVDDVRDFGRLLGNLNGVISDVYGDEVPLFSEAAVDEAKNVLLDKTLGIKDRSSKLEKIFGVSDKTSKEIIKGLCGGKISPAVLFGDEYKEEKSVSFKEITDENFEGMRATYGDDFALLEGIRSVYGYVTFEKLLSDHTDLSSAMMDVYDKHKKDLLALKAFIRSERPEDYNKIFKSTDEKYNYVNYIGYTKKGGDKKKVKKCKDDEFYAYIKKYLQGLTDVKDVAVRDKFLKDIEAGSFMQKILHSDNGLFPKQINEYELKKILENMVKSFPATAEIKDKIVTLFNYRIPYYVGPLAGKEETCWAVKKSNEKITPWNFDDVIDKAKSNEKFMLRMTNKCSYLRGEDVLPKASIIYQKFDTLNQLNKLRVNDELLTVDLKQKIFNELFLKYPKVSDKKIIDLLVREGKISQNDRSEVTLSGKDGEFKASMSSYIHLKNILGDFVDKDLSENGGVCENIILWHTLNTDKNIVVDLIKENYGKIPEIKNAIKQLKGLVFHDFGRLSRKLLCEIYTVKEDTGELWNVLDALYETNENLNELLNDEKFSFGRNIKEENGEMTSYVGYKDVEELYVSPAVRRGIWQTLTVVDEYVKAIGKAPDKIFVEVTREDGIKGDAGRTQSRKRRLQEKFRTVSDAYADVIAELGEERFTDLKLRQERLFLYFRQLGRCMYTGERIDLNNINDVTRYDVDHILPRTFIKDDSLDNKVLVLRSKNAKKSDTYPLPAGFSNQRDFWKMLLDKGLIAKVTYDRLTRTEPLRDDEYQDFINRQKVITDQTVKVVAELFKRRYPTAKIVYSKAKNVNDFKQKFDLFKCRETNDLHHARDAYLNVVVGNVYDTVFTTPMSMYRKDGDVWRTYNLNKLFTRDVKGAWDNAQSIATVKKVYSKNSMVVTRYATCNNGGFYNATVYSKDEKGITAPRKGKGPLSDSSKYGGYMTQPTAYFAIVSSKDKNGNEIKTIEAVPVLTAYVAKNDPKAVEKYFTGRLKDAKIIVPKIKIKQLASYNGTLCCLAGTTDNRILVHNAVELFTDGKTDEYVNSLLKLADMKAKGIINVGQEEFVMKTNRDGERKLVIDRANNADLYDMLKRKLERENYAGLSAFATFRKNLEKGEEKFNSLTVYEQTGVLLQILKFFKCNAETADTTLVGGSAKSGSIKFNNNITNVDFRLIDLSPAGLTERVRKV

SEQ ID NO: 80 - protein, 1337 aa, synthetic construct
  REGION 1..1337: note = MG44-80 effector
MEKFYIGTDIGTNSAGVACTDENYNLLRVKGKDCWTVRLFDEGKTAVDRRTFRTGRRRLQRRKQRIAWLQDLFAPYMEDETFFIRLNNSQFLPEDKDALLGVDKNTLFAGVYDDKKFHTEFPTVYHLREALMRGGINDLRLYYLALHHIVKYRGHFLTEGSVDDVRDFGRLLGELNEGDSRVYGDDFPTFSEAAVDEAKNVLLDKTLGIKDRSFKLEKIFGVSDKTSKEIIKGLCGGKISPAVLFGDEYKEEKSFSFKEITDDNFESMRGTYGDNFTVLEVIRSIYGYVIIENLLSGHDDLSSAMIAVYDKHKDDLLALKAFIRSERPEDYNKIFKSTDEKYNYVNYIGYTKKGRDKKKVKKCKDDEFYAYIKKYLQGLTDVKDVAARDKFLKDIEAGSFMQKILHSDNGLFPKQINEYELKKILENMVKSFPATAEIKDKIVTLFNYRIPYYVGPLAGKEETCWAVKKSNEKITPWNFDDVIDKAKSNEKFMLRMTNKCSYLRGEDVLPKASIIYQKFDTLNQLNKLRVNDELLSIDLKQKIFNELFLKYPKVSDKKIIDLLVREGKISQNDRSEVTLSGKDGEFKASMSSYIHLKNILGDFVDKDLSENGGVCENIILWHTLNTDKNIVVDLIKENYGKIPEIKNAIKQLKGLVFHDFGRLSRKLLCEIYTVKEDTGELWNVLDALYETNENLNELLNDGRFSFGRNIKEENGEMTSDVGYKDVEELYVSPAVRRGIWQTLTVVDEYVKAIGKAPDKIFVEVTREDGIKGDAGRTQSRKRRLQEKFRTVSDAYADVIAELGEERFTDLKLRQERLFLYFRQLGRCMYTGERIDLKNIDDVTRYDVDHILPRTFIKDDSLDNKVLVLRSKNAKKSDTYPLPAGFSNQRDFWKMLLDKGLIAKVTYDRLTRTEPLREDEYQDFINRQKVITDQTVKVVAELFKRRYPTAKIVYSKAKNVNDFKQKFDLFKCRETNDLHHARDAYLNVVVGNVYDTVFTTPMSMYRKDGDVWRTYNLNKLFTRDVKGAWDNAQSIATVKKVYSKNSMIVTRYATCNNGGFYDQTIYGKEEKGITAPRKGKGALSDSSKYGGYMTQPTAYFAIVLSKDKKGNEVKTIEAVPVLTAYVAKNDPKAVEKYFTGRLKDAKIIVPKIKIKQLASYNGTLCCLAGTTDNRILVHNAVQLFTDGKTDEYVNSLLKLADMKAKGIINVGQEEFVMKTNRDGERKLVVDRANNADLYGMFKRKLERENYAGLSAFATFRKNLEKGEEKFNSLTVYEQTVVLLQILKFFKCNAETADTTLVGGSAKSGKILINNNITNVDFRLIDLSPAGLTERVRKV

SEQ ID NO: 81 - protein, 1420 aa, synthetic construct
  REGION 1..1420: note = MG44-81 effector
MSNYDNFRKYGDYYIGLDVGTGSCGWAVTDKSYNILKVSGKSLWGVRLFPTADTAAERRSHRCARRRVFRTRQRLNLLEQLFDPEISKVDVGFFQRLKNSEFKEISKNNLFGDNSYKDKDFFKEYPTIYHLRYKLMNEPVDDIRLLFLAVHHIIKHRGHFLFERLDVNNIGASLPELWEQCCSQFVDISLFSNVSDDFQEIADSLKQNLIDMRDDVINVIRTSSDKRSDLKKVFAQLKSVYDEISDPEVKKSTENKVNRWYLLLLGYKVSAAEIFTIEESDEEGLSCKIKFNSSDYDEQIQKINDEFKGVVESEKAVYDVIKLQEILKDCNSISESKVELFNKHAEELRIFKSLLRERLSESLLAEVNKKVNVAKNEKLTTEPKSFYKEIFEERNKNTEKGKICFYYDITHGDKSANKEAIKGSSIYKRLQILAQILLCSSEINKLSEKEKVLLHRIGDLSIFETQVSADNSVIPYQINLAELDKILKVQSKNFAFLSEKDDAGVSVYDKIKALLTFRIPYYVGPLNNHSKFSWIVKKSQEKIVPWNFESVVDTEKSAEAFIKRMTSKCTYLSGEDVLPKNSIIYSKFMVLNVLNNIRINGMRLDEAQTGLTKKVFDELYCNQINVTQKQLVAYLYNNGFLTSKEELTGFDDEQKVSMSSYVKIKNALGTDNFDINFAESFIKYSTLFPNDYLMIEKRLKREFSSECAKFNENLSKLCRIKFSGWGRLSEKLLTGLLGHNKNSEFDKNSILGFMLNGKGNLMELLSSEYTFSDLISSENSTLDKNDAFSYQNLVEGLYVSPSVKRMIWQTLLVVREITKKIMGYEPSRIFVEMARGATADQKGKRTNSRKKSILALYDKCRKDFDISEIYSSLEKQDDNKLLSDKIYLYYTQLGKSMYTGNKIELEDLLNNSKQYDIDHIIPQSLTKDDSIDNRVLVERTVNEEKDNNYPLSYQIRENQTQFWKHLLDLGLISKSKFERLIRSTSLSNSEKEGFIARQLVETRQSTKAIAGLLSKLYKKAKIIYPKAGLTADFKQKFDLIKVRELNDLHHAKDAYCNIVVGNVYFEKFTSKYQYVIANNERYSFSTSDTSYIFTNQNEKRLQQSGIWDSRNGCSISVVRKNYYRNNILKTIKQEEVKGKLFDLTLYGPSKATIKKKKHLGCEYGGYDKDYNTFFSFISFISKKKKIYRFIGIPLRIVENSNNIHDSIVQYLLDEKFENPQILIEKLPFPFILKNNETGFLYKVSSYEKANKRITLQQFNSLILSIRSQKILKAIESFERKVKLNDKKVNFVYDEKKSGFSEQDLTNLFSELKSKVENTFFNCLPAVITNVLKNIDLQTYRVKEKDSDERLLTIEQKVHVVVELLKAFQSNGASSDLHDIGESKNSGIVRTTELDFEKYSIINYSVTGFYFIETKLRDLIK

SEQ ID NO: 82 - protein, 1347 aa, synthetic construct
  REGION 1..1347: note = MG44-82 effector
MEKEQKFYLGLDIGTNSVGIACTDENYNLLRVKGKDCWAVRLFDEAQTAADRRTARTARRRLQRRRYRINQLQGLFAPFMQDNLFFLRLNNSQFFADDKAGELDGDVNNLFADSGFTDRNFHEKYPTIYHLRFALQQSPVDDIRLYYLALHHIIKYRGHFLYDGNVSEVRDVHKLFDALNTVCENTFAENTPHFDIEKADEAKDMLLRSKGKLKDTVKSIKQLFSVQNDDCGKIRTEIINGFCGAKFSPEKLLGDTYSEEKSFAFRDVKEDAFEAMQSTYGDDFALLKAMREIYNFVTFERLFNGQPNISSAMIAVYDKHKSDLKKLKGFIKKNYDTDGGKKCREMFSDVTQKANYVNYVGHVGYGKSRKRVKTCDYDSFIAYVKKFLMDGNFAHDETYDEIMAEIEAKTFLPKILHSDNGLVPHQVNEDELVKIVAQMVRAFPETAQMASKILPLFLFRIPYYVGPLVGSNSWAVRKSDEKITPWNFRDVVDEAASNEEFMRRMTNKCTYLHGVDVLPKCSIAYQKFNTLNQINKLKVNDCAISVPLKQKIFAELFLVKPRVSDKMIASLIVREGAVAPGDSVVLSGKDGGDIKASMSSYIQLKRILGDFVDYDLASGGNVCENIILWHTLNTDKRLVEDLIVKNYGDNPAVAPYVKQLKGLVFNDFGKLSGRLLTELDVVDKQTGELCTVTDLLWNTNENFNELMFDKRYNLEEVIAAENNDDDGKVDYEDVQKLYVSPAVRRGIWQSLQMVDEYVAALGKEPDKVFVEVSREEGVKGDKGRTHSRKKQLLEKYKNINPKDVENIDELTGELNSDKISDMRLRQERLYLYFRQLGRCMYSGEPIDLDHINDSKLYDVDHILPRSYIKDDSLDNKVLVLRSKNAEKSDTYPLPLGFTNQQGWWKMLRAKDLISSGTYDRLMRTAPLTDDDYNDFINRQKVITDQTSKAVIELLKRKYPGATLVYSKAVNVADFKSKFDLYKCRETNDLHHARDAYLNVVVGNVYSTVFGVRIETCVKDGEKWKTYNLKKMFTRDVPGAWNENSIRTVKGVYNSSSMCVTRYAYCNKGAFYKQTVYSGNENITAPRKGKGPLANMERYGGYMTQSTAYFAIVESQGKKGRIKTIEAVPVMVDYQSRNDPDRVVKYFEENGLVDVKLIVPKIKIKQLVSYNGSWVWLAGITGPSIIVHNATELFTDNRTDMYVKQFVKLLEMAKNPTFDVNCEKYELTPNRERGEKITIDRESNIKLYDFFLSKFDCSKFKGVSSYVTFGKNLSIGREKFVALTVSQQVNVLNQIVNFFKCNAETADIELIGGSKISGKILFNKNITDVDFRIISQSPCGLTVHVKRV

SEQ ID NO: 83 - protein, 905 aa, synthetic construct
  REGION 1..905: note = MG44-83 effector
MAKNHPETTDMTKKLRKLFLFRVPYFVGPLAGENSWAVRKTNEKVTPWNFDDVIDKAASNEEFMRRMTNHCSILHAEDVLPKCSMIYQKYNVLNQLNKLKINDCPLPSVELKQKIFNELFLKYNKVSDKKIIDLLVRSGEVSPEEARAITLTGKDGELNASMSSYITFKNILGDFADKPENAEILEKIILWHTLNTDKKIVEDLILKHFGKIPEIKNNVKALKGLVFKDFGRLSEKLLTGLKAADKETGELLSIIDILYETNQNLNEILANERYNFAELIKAENGEESDEIGYKDIEELYVSPAVRRGIWQSLIMADEYINAVGKVPDRIFIEFTRTDETKGEAGKKLSRKKQLSDKFKAIKDAEFQDIIAELNSDEITDMKLRQERLYLYFRQLGKCMYSGNQIDLSLLNTDTYDVDHILPRSYTKDDSLDNKVLVLRDCNAKKADHYPVPSDLRQVKLWKLLHEKGLISKKTFDRLMRTEPLGEGDYEDFINRQKVITDQTAKAVAELLQRKYPKTQIVYSKAKNVVDFKNKSNLYKCRETNNLHHARDAYLNIVVGNVYHTCFSTPMAMFYKKDDGWRENNLKTMFTRNVKGAWDENSLQLVKSTFKKHTMAVSQYAFCYNGMFYDQTVYPKGDPGITAPRKGNGALADVEKYGGYKSQKTSYFAIVQSKGKKGQTIKTIEAVPVLTAYRQRTNPDALLDYFKTYLSEPTILIPKLKVRQLVSYNGTPIYIAGITGNQIIAHNATELFTDNETDEYVNQLSKLVEMAKNGTISEENGEYIIKTNRNKDVKLTINRQSNIELYDTLKNRLLKSNFQGLPSFSTFRKNLENGENNFVNLSLTDQCSVLLQLLKFFKCNAETADISLIGGGGRSGTLYLNKDISKVDFKIICKSPAGLTERIKKV

SEQ ID NO: 84 - protein, 1337 aa, synthetic construct
  REGION 1..1337: note = MG44-84 effector
MEKFYIGTDIGTNSAGVACTDENYNLLRVKGKDCWAVRLFDEGKTAVDRRTFRTGRRRLQRRKQRIAWLQDLFAPYMEDETFFIRLNNSQFLPEDKDALLGGDKNTLFAGVYDDKKFHTEFPTVYHLREALMRGGVNDLRLYYLALHHIVKYRGHFLTEGSVDDVRDFGRLLGNLNGVISDVYGDEVPLFSEVAVDEAKNILLDKTLGIKDRSTELEKNFGVKDKTSKEIIKGLCGGKISPAVLFGDEYKEEKSFSFKEITDENFEGMRATYGDDFALLEGIRSVYGYVTFEKLLSDHTDLSSAMMDVYDKHKKDLLALKAFIRSERPEDYNKIFKSTDEKSNYVNYIGYTKKGGDKKKVKKCKDDEFYAYIKKYLQGLTDIKDVAARDTFLKDIEDGSFMPKILHSDNGLFPRQINEVELKKILDNMVKSFPATGEIKDKIVTLFNYKIPYYVGPLAGKEETCWAVKKSNEKITPWNFDDVIDKAKSNEKFMLRMTNKCSYLRGEDVLPKASIIYQKFDTLNQLNKLRVNDELLTVDLKQKIFNELFLKYPKVSDKKIIDLLVREGKISQNDRSEVTLSGKDGEFKASMSSYIHLKNILGDFVDKDLSENGGVCENIILWHTLNTDKNIVVDLIKENYGKISEIKNAIKQLKGLVFHDFGRLSRKLLCEIYTVKEDTGELWNVLDALYETNENLNELLNDEKFSFGRNIKEENGEMTSDVGYKDVEELYVSPAVRRGIWQTLTVVDEYVKAIGKAPDKIFVEVTREDGIKGDAGRTQSRKRRLQEKFRTVSDAYADVIAELGEERFTDLKLRQERLFLYFRQLGRCMYTGERIDLNSINDVTRYDVDHILPRTFIKDDSLDNKVLVLRSKNAKKSDTYPLPAGFSNQRDFWKMLLDKGLIAKVTYDRLTRTEPLREDEYQDFINRQKVITDQTVKVVAELFKRRYPTAKIVYSKAKNVNDFKQKFDLFKCRETNDLHHARDAYLNVVVGNVYDTVFTTPMSMYRKDGDVWRTYNLNKLFTRDVKGAWDNAQSIATVKKVYSKNSMVVTRYATCNNGGFYNATVYSKDEKGITAPRKGKGPLSDSSKYGGYMTQPTAYFAIVSSKDKNGNEIKTIEAVPVLTAYVAKNDPKAVEKYFTGRLKDAKIIVPKIKIKQLASYNGTLCCLAGTTDNRILVHNAVELFTDGKTDEYVNSLLKLADMKAKGIINVGQEEFVMKTNRDGERKLVIDRANNADLYDMLKRKLERENYAGLSAFATFRKNLEKGEEKFNSLTVYEQTVVLLQILKFFKCNAETADTTLVGGSAKSGSIKFNNNITNVDFRLIDLSPAGLTERVRKV

SEQ ID NO: 85 - protein, 1334 aa, synthetic construct
  REGION 1..1334: note = MG44-85 effector
MKKFYIGADIGTNSVGVACTDESYRLIRAKSKDCWAVRLFDEGETAFDRRTKRTARRRLARRKQRINWLQELFEPFIDDKTFFIRLNNSQYLPEDKDSLLCGNKNNLFENEGEESKFYKKYPTLYHLRKALMDGGNFDIRLYYLALHHIIKYRGHFLYEGSIEDIRDFSNLMKGLDCAIADSYDGGLNLFDSVDSAKVRDILIDKKSGLKDKQVELEKLLCVKSKREKEILKGITGQKISPYVLFGDEFKEEKSFSLNDMSDEEFESKRSSYGESFTLLDLMHSVCNYVKFEKIFEGHSDISSAMISVYEKHKADLVLLKKVVRKQSKEDYNKIFRSVNEEKNYVNYIGYTSKDGRKIKVKKCKDEDFFKYLKKYLNGILNEDNFDIVSKIIKEIDDRIFLPKILHSDNGLFPKQVNEFELKKIIENMVRNYAETEEMASAVLSLFNYKIPYYVGPLTGCNSWVVRTDEKVTPWNFDRVVDLAKSNEAFMRRMTNKCAYIKGEDVLPKASIIYQKYDTLNQLNKLRINDRVISIELKQTIYNELFLKYPKVTDKKIKELLVREGLCSSSETKDITISGKDGDFKSSMSSYIRLKNILGDFVDDDLKSGGKVCENIILWHTLNTDKKIVEDLIEKNYGFIPEIKANIKQLKGLTFNDFGRLSAKLLIGIEGVDKTTGQILTILDVLYQTNQNLNEVLNNESYNFSEIIDEENGIETEIISYETVEELYVSPAVRRGIWQTLLMIDEYVNAVGRQPDKIFIEVTRNDGKKGDNGRTQPRKRQLQEKFKNIGSAYSDIIEELSEEKYTDLKLRQERLYLYFRQLGRCMYTGERIILDELNGNRYDVDHILPRTYVKDDSLDNKVLVCRGANATKADTYPLPTEFSRKEVRAHWKMLLDKDLISKTTYDRLTRIEPLKDDDYNDFINRQKTITDQTAKAVIELLKRKYPNAKLIFSRAKNVNDFKNRFNLFKCRETNDLHHARDAYLNVVVGNVFDSVFSTPLGQSRKDGDVWRIYNLKKLFTRDVIGVWSKDSIKIVKDTYSKPSMSVTRYATCNKGKFYDETVCRKNDSAITAPRKGKGPLSDVTKYGGYTTQKTAYFAIVTSVDKKGKSIKTIEAIPVLVTYKLKTDTNAIQKYLESYLREPIIVIPKVKVKQLVSYNGSLCYLAGITNNQITVHNASQLYTDNTTDEYVNELIKIIGMGDNGIITGNESQYITKTNKDGVIRIVVNKENNEKLYETLKNKLDSKIYKGLSAFASFKKNMERGKDKFCELSVLEQAKVLLQILKVFRCNAEISDIQAIGGTAHSGKKLFAKNITDVDFKLVNLSPAGLTVRIRKV

SEQ ID NO: 86 - protein, 1347 aa, synthetic construct
  REGION 1..1347: note = MG44-86 effector
MEKEQKFYLGLDIGTNSVGIACTDENYNLLRVKGKDCWAVRLFDEAQTAADRRTARTARRRLQRRRYRINQLQGLFAPFMQDNLFFLRLNNSQFFADDKAGELDGDVNNLFADSGFTDRNFHEKYPTIYHLRFALQQSPVDDIRLYYLALHHIIKYRGHFLYDGNVSEVRDVHKLFDALNTVCENTFAENTPHFDTEKADEAKDMLLRSKGKLKDTVKSIKQLFSVQNDECGKIRTEIINGFCGAKFSPEKLLGDAYSEEKSFAFRDVEEDAFEAMQSTYGDDFALLKAIREIYNFVTFERLFNGQPNISSAMIAVYDKHKRDLKKLKGFIKKNYDTDGGKKCREMFSDVTQKANYVNYVGHVGYGKSRKRVKTCDYDSFIAYVKKFLMDGNFAHDETYDEIMAEIEAKTFLPKILHSDNGLVPHQVNEDELVKIVAQMVRAFPETAQMASKILPLFLFRIPYYVGPLVGSNSWAVRKSDEKITPWNFRDVVDEAASNEEFMRRMTNKCTYLHGVDVLPKCSIAYQKFNTLNQINKLKVNDCAISVSLKQKIFAELFLVKPRVSDKMIASLIVREGAVAPGDSVVLSGKDGGDIKASMSSYIQLKRILGDFVDYDLASGGNVCENIILWHTLNTDKRLVEDLIVKNYGDNPAVAPYVKQLKGLVFNDFGKLSGRLLTELGVVDKQTGELCTVTDLLWNTNENFNELMFDKRYNLEEVIAAENEDDNDKVDYREVQKLYVSPAVRRGIWQSLQMVDEYVAALGKEPDKVFVEVSREEGVKGDKGRTHSRKKQLLEKYKNINPKDVENIDELTGELNSDKISDMRLRQERLYLYFRQLGRCMYSGEPIDLDHINDSKLYDVDHILPRSYIKDDSLDNKVLVLRSKNAEKSDTYPLPLGFTNQQGWWKMLRAKDLISSGTYDRLMRTAPLTDDDYNDFINRQKVITDQTSKAVIELLKRKYPNATLVYSKAVNVADFKSKFDLYKCRETNDLHHARDAYLNVVVGNVYSTVFGVRIETYVKDGEKWKTYNLKKMFTRDVPGAWNENSIRTVKGVYNSSSMCVTRYAYCNKGAFYKQTVYSGNENITAPRKGKGPLANMERYGGYMTQSTAYFAIVESQGKKGRIKTIEAVPVMVDYQSRNDPDRVVKYFEENGLVDVKLIVPKIKIKQLVSYNGSRVYLAGVGDVRILVHNATELFVDNKIDDYVNQLLKIVEMAKQPTFNKNSDCYIVKTNRMGDIKLVVDKGSNVKLYDELILKLECKQFQGFGAYTSFRNVLTESREKFVDLSTLEQAIVLLEVLKFFKNNADTADLSLIGESKRAGILRFSKNITDVDFRIISQSPCGLTVHVKRV

SEQ ID NO: 87 - protein, 1602 aa, synthetic construct
  REGION 1..1602: note = MG44-87 effector
MSILDKKQMTEEDIKLNFITPAIKEKGWDGKITMETKITDGRINLKGNIASREAPKKADYILYLNSANPLAVVEAKDNNHSISFGMQQAKLYAEMLDIKFAYSSNGDGFQEFDFLTGVEREISLEEFPTPDELYARYNAEINDGSGLSKTELSFINQPFYTSQTTYPPRYYQRNAVNRTLDAIAKGKNRLLLVMATGTGKTYTAFQIVYRLLQTGAKQKILYLADRNNLIDQTIGGDFKPLEKVIHKINFLKDDRTTIASYQVYFSLYQQLAGNKKEDDDESDEEVLARYSKLFDKDFFDLIIVDECHRGSAKENSRWRKILEYFSSATQIGMTATPKETQSISNIDYFGEPVYIYSLNLPEDKDSLLCGNKNNLFENEGEESKFYKKYPTIYHLRKALMDGGNFDIRLYYLALHHIIKYRGHFLYEGSIEDIRDFSNLMKGLDCAIADSYDGGLNLFDSVDSAKVRDILIDKKSGLRDKQVELEKLLCAKSKREKEILKGITGQKISPYVLFGDEFKEEKSFSLNDMSDEEFESKRSSYGESFTLLDLMHSVCNYVKFEKIFEGHSDISSAMISVYEKHKADLVLLKKVVRKQSKEDYNKIFRSVNEEKNYVNYIGYTSKDGRKIKVKKCKDEDFFKYLKKYLNGILNEDNFDIVSKIIKEIDDRIFLPKILHSDNGLFPKQVNEFELKKIIENMVRNYAETEEMASAVLSLFNYKIPYYVGPLTGCNSWVVRTDEKVTPWNFDRVVDLAKSNEAFMRRMTNKCAYIKGEDVLPKASIIYQKYDTLNQLNKLRINDRVISIELKQTIYNELFLKYPKVTDKKIKELLVREGLCSSSETKDITISGKDGDFKSSMSSYIRLKNILGDFVDDDLKSGGKVCENIILWHTLNTDKKIVEDLIEKNYGFIPEIKANIKQLKGLTFNDFGRLSAKLLIGIEGVDKTTGQILTIMDVLYQTNQNLNEVLNNESYNFSEIIDEENGIETEIISYETVEELYVSPAVRRGIWQTLLMIDEYVNAVGRQPDKIFIEVTRNDGKKGDNGRTQPRKRQLQEKFKNIGSAYSDIIEELSEEKYTDLKLRQERLYLYFRQLGRCMYTGERIILDELNGNRYDVDHILPRTYVKDDSLDNKVLVCRGANATKADTYPLPTEFSRKEVRAHWKMLLDKDLISKTTYDRLTRIEPLKDDDYNDFINRQKTITDQTAKAVIELLKRKYPNAKLIFSRAKNVNDFKNRFNLFKCRETNDLHHARDAYLNVVVGNVFDSVFSTPLGQSRKDGDVWRIYNLKKLFTRDVIGVWSKDSIKIVKDTYSKPSMSVTRYATCNKGKFYDETVCRKNDSAITAPRKGKGPLSDVTKYGGYTTQKTAYFAIVTSVDKKGKSIKTIEAIPVLVTYKLKTDTNAIQKYLESYLREPIIVIPKVKVKQLVSYNGSLCYLAGITNNQITVHNASQLYTDNTTDEYVNQLIKIIGMGDNGIITGNESQYITKTNKDGVIRIVVNKENNEKLYETLKNKLDSKIYKGLSAFASFKKNMERGKDKFCELSVLEQAKVLLQILKVFRCNAEISDIQAIGGTAHSGKKLFAKNITDVDFKLVNLSPAGLTVRIRKV

SEQ ID NO: 88 - protein, 1455 aa, synthetic construct
  REGION 1..1455: note = MG44-88 effector
MINNLNLSECLDDVVTKEPSDVVSQKDGYYVGLDIGTGSCGWAVTDLKYQVLKKSKKRLWGVRLFPTADTAAERRTFRCTRRRLQRRNWRLNLLKGLFEAEINKVDPAFFMRMKESMLQDDDRTTTARNALFADENYKDKNYAEEYPTIYHLRLNLMEKAPKDIRLLYLAIHHILKHRGHFLFENFNVDNISGSFETIWRNVSNIIVEKVFSNPDLESEPIDDDGDDGDLNNNAIERLQSHGQEVLQQLLSLNRNRTDVKKRLLSIFEEALGEKADKKKKKSIEQCVAALVGAKFKPFVCVSDDEPEEEQLKIELCFGSANYETDFATKLGSTQQSVFAILKEVYDFVRLQNLLGGRKSISEAKVEMYKEHSKDLIVLKDLIRNSDHLQDNEKTFLYNNVFKKYDAPVKCVGECLYETILRYRALEIKSTTNKDLAPAKALYGQLMEIAQKFIEMNAAGAVIEPDILKVCNRIVDGTIFSHAVSVENSVIPQQLHAFELKKILENAKAQFPFLNESDEFGTVVDKIIKLHSFRIPYYVGPVNNYVGELNNSGNKHAWCVKNEGVNLPYTPWTFHKIVDTKKSAQEFINRMTSKCTYLRYADVLPKCSILYSEFEVLQELNNIRFNGCKLKHEQISLLIEELYKKDKNVTLKKLKNLLVSRMGFSREDVEVVSGIDLELKGNMASYVQLNELLKSNGIQLKDEKQKIDVMEQIILWVTIFEDTKVLKDKLSQELGYLLNDKVINSVVGLRFAAWGRLSREFLENVLGRVRNDKLDVPVNIMTRLRKGEGNLMMLLSDAYTYSETVAKLNEQSSEVKKYDSISYDMVDELYVSPSVKRMIWQSLKVVDEIVNIMGGVQLKKIFVEMARGEEKKPERTVSRKKYLQDLYQNCRKQEPELAEQLDKVENSSLLNERLYLYYTQFGRCMYSGEAIDLEKLFDSYDVDHIYPRCYVKDDSLDNKVLVKRTLNGIKSKTYPLGAVADIAKNFDVCRPLWTKLRDKGLISNEKYKRLIRTTEFTQDELQSFVARQLVETRQSTKEVCNLLKQVYKDSRVVYSKAGNVSDFRHKFSFIKVRELNCLHHAKDAYLNIVVGNVFDEKFCHGDIRKFFSICSHTEEGYTFREGDTDVFSKPGDRLKKLGVWSGLDQIGAIRKQYRQNDIFVTELQEIRSGQFFDMNLSPKEAGLIPPKDIRVQTKNELVSGEILPKTGLDTSKYGGYKGASTSYFAFIEYTEKNKVVRSFAAVPVYINSMKGNLKDNIKDYFAKNGYASPKVLISQLKMPFFLRDNKTSLTFKVSGVSGNSLLCGLAEQLTLSEKDTAQLKKVVSFLKKLQEDNSYQYSPKFAGFSDSELNELLNILKWKITNTKFKNISEPVTKLLLKITQFDENLVLSIPDKAKLVMNLVGIFENRDHTNDLSLIGGKKQMGRLKKSIKPKGDFSIVYQSVTGFYVHEIKLNELK

SEQ ID NO: 89 - protein, 1420 aa, synthetic construct
  REGION 1..1420: note = MG44-89 effector
MSNYDNFKKYGDYYIGLDVGTGSCGWAVTDKSYNILKVSGKSLWGVRLFPTADTAAERRAHRCARRRVFRIRQRLNLLEQLFDPEISKVDVGFFQRLKNSEFKEISKNNLFGDNSYKDKDFFKEYPTIYHLRYKLMNEPVDDIRLLFLAVHHIIKHRGHFLFERLDVNNIGASLPELWEQCCSQFVDISLFSNVSDDFQEIADSLKQNLIDMRDDVINVIRTSSDKRSDLKKVFAQLKSVYDEISDPEVKKSTENKVNRWYLLLLGYKVSAAEIFTIEESDEEGLSCKIKFNSSDYDEQIQKINDEFKGVVESEKAVYDVIKLQEILKDCNSISESKVELFNKHAEELRIFKSLLRERLSENLLAEVNKKVNVAKNEKLTTEPKSFYKEIFEERNKNTEKGKICFYYDITHGDKSANKEAIKGSSIYKRLQILAQILLCSSESYKLSEKEKVLLHRIGDLSIFETQVSADNSVIPYQINLAELDKILKVQSKNFSFLSERDDAGVSVYDKIKALLTFRIPYYVGPLNNHSKFSWIVKKSQEKIVPWNFESVVDTEKSAEAFIKRMTSKCTYLSGEDVLPKNSIIYSKFMVLNVLNNIRINGMRLDEAQTGLTKKVFDELYCNQINVTQKQLVAYLYNNGFLTSKEELTGFDDEQKVSMASYIKIKNALGTDNFDINFAESFIKYSTLFPNDYLMIEKRLKREFSSECAKFNENLSKLCRIKFSGWGRLSEKLLTGLLGHNKNFEFDKNSILGFMLNGKGNLMELLSSEYTFSDLISSENSTLDKNDAFSYQNLVEGLYVSPSVKRMIWQTLLVVREITKKIMGYEPSRIFVEMARGATADQKGKRTNSRKKSILALYDKCRKDFDISEIYSSLEKQDDNKLLSDKIYLYYTQLGKSMYTGNKIELEDLLNNSKQYDIDHIIPQSLTKDDSIDNRVLVERTVNEEKDNNYPLSYQIRENQTQFWKHLLDLGLISKSKFERLIRSTSLSNSEKEGFIARQLVETRQSTKAIAGLLSKLYKKAKIIYPKAGLTADFKQKFDLIKVRELNDLHHAKDAYCNIVVGNVYFEKFTSKYQYVIANNERYSFSTSDTSYIFTNQNEKRLQQSGIWDSRNGCSISVVRKNYYRNNILKTIKQEEVKGKLFDLTLYGPSKATIKKKKHLGCEYGGYDKDYNTFFSFISFISKKKKIYRFIGIPLRIVENSNNIHDSIVQYLLDEKFENPQILIEKLPFPFILKNNETGFLYKVSSYEKANKRITLQQFNSLILSIRSQKILKAIESFERKVKLNDKKVNFVYDEKKSGFSEQDLTNLFSELKSKVENTFFNCLPAVITNVLKNIDLQTYRVKEKDSDERLLTIEQKVHVVVELLKAFQSNGASSDLHDIGESKNSGIVRTTELDFEKYSIINYSVTGFYFIETKLRDLIK

SEQ ID NO: 90 - protein, 1332 aa, synthetic construct
  REGION 1..1332: note = MG44-90 effector
MKKFYVGTDIGTNSVGVACTDENYKLLRAKGKDCWTVRLFEEAKTAAERRTFRTARRRLARRRQRIAWLQDLFAPYIEDKTFFIRLNNSQFLSEDKDELLGGNKNNLFAGEYDDRKYHEEFPTVFHLREALITGGKYDLRLYYLALHHIIKYRGHFLFEGSVEEIRDFSRLLKGLNGVLSDLYGDEISAFSETASDEVKAILLDKTKGIKDKQLLLEKLFAVSDKTSKEIIKGIIGAKISPAVLFGEEYKELKNFSFKETSDDTFEQMRMDYGNNFALLEAMRSIYSYVTFEKLLEGHRDISSAMIAVYDKHNSDLNKLKNFIRTEAKEYYNQIFRNVNEKSNYVNYIGHTIKDGVKKKVKRCKDEEFFAYLKKILSSLNNVNDEACRNAILAELENGTFLPKILHSDNGLFPRQINEAELNRIVTNMVKNYPGTAAFADKILPLFRFRIPYYVGPLTGTNSWAVRTAEKVTPWNIEQVVDFAKSNEEFMRRMTNKCTYLRGEDVLPKASVLYQKFDVLNQINKLRVNDMLLPIALKQKIYNELFLVYPRVSDKKIKELLVRENYISAEDAKAIVLKGKDGEFKASMSTYIRLKKILGDFVDKDIESGGGVCENIVLWHTLNTDKKIVEDLIRKNYGNIPEIKAAISQLKGLTFNDFGKLSAKFLNGITAINKTTGEIVTILDVLFDTNENLNEILNDENYNFAEVIESENGLADSKVDYSSVEELYVSPAVRRGIWQTLGIIDEYVAAIGKTPDKIFVEVTREDGQKGDEGRTQPRKRQLLEKYKNVGEAYADVIAQLNDEKYSDLKLRQERLFLYFRQLGRCMYSGARIDLENLNTDTYDVDHILPRTYIKDDSLDNKVLVLRSKNAKKSDTYPLPEEFFNQRGFWKMLLEKNLISRTTYDRLTRTEPLGDNDYKDFINRQKVITDQTAKAVIELLGRKYPNTKIVFSKAKNVNDFKNKFNLFKCRETNDLHHARDAYLNVVVGNVYDTVFSTPIAMFRHDGDAWRTYNLKKLFTRDVAGAWSDDIRKTVLDTFAKHSIMVTRYATCNKGMFYDQTVYEKGDSCITAPRKGAGPLADYSKYGGYSSQKTAYFAIVSSIGKKGERIKTIEAIPVLVDYRLKTDPDAIIKYLKAKLNQPEIIVSKLKIKQLVSYNGTLCSIAGITGTQISVHNANQLFTDNKTDEYVCALLKLLDMNSKNMVAHDETEYVIKTNRNGERKLVITKESNIKLYDVLRNKLDSDIYSGISAFKTFKGNLDNSSVIFAELNIIDQAKVIIQVLKVFKNNAETADIRLIGGGPQSCRIQINKNITDVDFKIIDLSPAGLTRRIRKV

SEQ ID NO: 91 - protein, 1334 aa, synthetic construct
  REGION 1..1334: note = MG44-91 effector
MEKFYLGMDIGTNSVGMACTDENYNLLRAKGKDCWSVRLFDESKTALDRRTYRTSRRRLQRRKYRLALLQELFAPFIDDKNFFIRLNNSQFLPEDKDGALFGDKNNLFNDPALDDKTFHGQFPTIYHLRKALIDGGDYDLRLYYLALHHIIKYRGHFLFEGSMNDIRNINRLFTALNDTLKNVYGDDEAPEFAATSAEKAKEILLDPKKNIRDKEQELEKLFGAESKLEKEIIKGMCGAKISPSVLFGESFKEEKSFSFKELTDETFDAMRQTYGDNFALPEALRAIYSFVTFEKLLVGKPDISSAMIAVYEKHKSDLKLLKDFLRAESGEIYGKVFKNTNEKANYVNYVGYTKKGGDKKKVKTCGYEEFRQYLKKAIAAIDAKDKETQNLILSELENGSFLPKILHSDNGLFPHQVNEDELVKIADNMAKNHPETTDMAKKLRKLFLFRVPYFVGPLAGENSWAVRKTDAKVTPWNFDDVIDKAASNEEFMRRMTNHCSILHAEDVLPKCSMIYQKYNVLNQLNKLKINDCPLPSVELKQKIFNELFLKYNKVSDKKIIDLLVRSGEVSPEEARAITLTGKDGELNASMSSYITFKNILGDFADKPENAEILEKIILWHTLNTDKKIVEDLILKHFGKIPEIKNNVKALKGLVFKDFGRLSEKLLTGLKAADKETGELLSITDILYETNQNLNEILANERYNFAELIKAENGEESDEIGYKDIEELYVSPAVRRGIWQSLIMADEYINAVGKVPDRIFIEFTRTDETKGEAGKKLSRKKQLSDKFKAIKDAEFQHIIAELNSDEITDMKLRQERLYLYFRQLGKCMYSGEQINLSALNDTKTYDVDHILPRSYTKDDSLDNKALVLRDCNAKKADHYPVPSDLRQVKLWKLLHEKELISKKTFDRLMRTEPLGEGDYEDFINRQKVITDQTAKAVAELLQKKYPTSQIVYSKAKNVVDFKNKFGLYKCRETNNLHHARDAYLNIVVGNVYHTCFSTPMAMFYKKDDGWRENNLKTMFTRNVKGAWDENSLQLVKSTFKKHTMAVSQYAFCNMGMFYNQTVYPKGDSGITAPRKGKGALADMQKYGGYKKEETSYFVIVQSKGENGQTIKTIEAVPVLTAYRQRSNPNAVLDYFKTYLNEPTILFPKLKTRQLVLYNGTSLYITGTTGDYITANNAIELFTDNKTDEYVNQLSKLVEIAKSGTITEENGEYIIKTNRNKDVKLTINRQSNIELYDTLKNKLSKPSYQGLSPFSTFRKNLESGEEKFANLSVTNQCTVLLQILKFFKCNAELANISLIGGGKGSGRILFNKDITNADFKIICKSPAGLTERIKKV

SEQ ID NO: 92 - protein, 772 aa, synthetic construct
  REGION 1..772: note = MG44-92 effector
MLSGKDGGDIKASMSSYIQLKRILGDFVDYDLASGGNVCENIILWHTLNTDKRLVEDLIVKNYGDNPAVVPYVKQLKGLVFNDFGKLSGRLLTELEVVDKQTGELCTVTDLLWNTNENFNELMFDKRYNLEEVIAAENNDDDGKVDYEDVRKLYVSPAVRRGIWQSLQMVDEYVAALGKEPDKVFVEVSREEGVKGDKGRTHSRKKQLLEKYKNINPKDVENIDELTGELNSDKISDMRLRQERLYLYFRQLGRCMYSGEPIDLDHINDSKLYDVDHILPRSYIKDDSLDNKVLVLRSKNAEKSDTYPLPLGFTNQQGWWKMLRAKDLISSGTYDRLMRTAPLTDDDYNDFINRQKVITDQTSKSVIELLKRKYPGATLVYSKAVNVADFKSKFDLYKCRETNDLHHARDAYLNVVVGNVYSTVFGVRIETYVKDGEKWKTYNLKKMFTRDVPGAWNENSIRTVKGVYNSSSMCVTRYAYCNKGAFYKQTVYSGNENITAPRKGKGPLANMERYGGYMTQSTAYFAIVESQGKKGRIKTIEAVPVMVDYQSRNDPDRVVKYFEENGLVDVKLIVPKIKIKQLVSYNGSWVWLAGMTGNRIIVHNATELFTDNRTDMYVKQFVKLLEMAKNPTFDVNCEKYELTPNRERGEKIIIGRDSNVKLYDFLLKKFDSEDDAKNKINKRFQGISSYLAFGQNLKSGREKFVSLTVLQQVNVLSQVMKFFRCNADTADIELIGGSKGSGKILFNQNITDVDFRIISQSPCGLTVHVKRV

SEQ ID NO: 93 - protein, 1337 aa, synthetic construct
  REGION 1..1337: note = MG44-93 effector
MEKFYIGTDIGTNSAGVACTDENYNLLRVKGKDCWAVRLFDEGKTAVDRRTFRTGRRRLQRRKQRIAWLQDLFAPYMEDETFFIRLNNSQFLPEDKDALLGGDKNTLFAGVYDDKKFHAEFPTVYHLREALMRGGVNDLRLYYLALHHIVKYRGHFLTEGSVDDVRDFGRLLGNLNGVISDVYGDEVPLFSEAAVDEAKNVLLDKTLGIKDRSTELEKIFGVKDKTSKEIIKGLCGGKISPAVLFGDEYKEEKSFSFKEITDDNFESMRGTYGDNFTVLEVIRSIYGYVIIENLLSGHDDLSSAMIAVYDKHKKDLLALKAFIRSERPEDYNKIFKSTDEKSNYVNYIGYTKKGGDKKKVKKCKDDEFYAYIKKYLQGLTDVKDIAARDKFLKDIEAGSFMQKILHSDNGLFPKQINEYELKKILENMVKSFPATAEIKDKIVTLFNYRIPYYVGPLAGKEETCWAVKKSNEKITPWNFDDVIDKAKSNEKFMLRMTNKCSYLRGEDVLPKASIIYQKFDTLNQLNKLRVNDELLSIDLKQKIFNELFLKYPKVSDKKIIDLLVREGKISQNDRSEVTLSGKDGEFKASMSSYIHLKNILGDFVDKDLSENGGVCENIILWHTLNTDKNIVVDLIKENYGKIPEIKNAIKQLKGLVFHDFGRLSRKLLCEIYTVKEDTGELWNVLDALYETNENLNELLNDEKFSFGLNIKEENGEMTSDVGYKDVEELYVSPAVRRGIWQTLTVVDEYVKAIGKAPDKIFVEVTREDGIKGDAGRTQSRKRRLQEKFRTVSDAYADVIAELGEERFTDLKLRQERLFLYFRQLGRCMYTGERIDLNNINDVTRYDVDHILPRTFIKDDSLDNKVLVLRSKNAKKSDTYPLPAGFSNQRDFWKMLLDKGLIAKVTYDRLTRTEPLREDEYQDFINRQKVITDQTVKVVAELFKRRYPTAKIVYSKAKNVNDFKQKFDLFKCRETNDLHHARDAYLNVVVGNVYDTVFTTPMSMYRKDGDVWRTYNLNKLFTRDVKGAWDNAQSIATVKKVYSKNSMVVTRYATCNNGGFYDQTIYGKDEKGITAPRKGKGPLSDSSKYGGYMTQPTAYFAVVSSKDKNGNEVKTIEAVPVLTAYMAKNDPKAVERYFSERLKDAKIIVPKIKIKQLVSYNGTQCYLAGTTGKQILVHNAVELFTDGKTDEYVNSLLKLADMKAKGIINVGQEEFVMKTNRDGERKLVIDRANNADLYGMLKRKLERENYAGLSAFATFRKNLEKGEEKFNSLTVYEQTVVLLQILKFFKCNAETADISSIGGGKIVGKIYVNINITNIDFRLIDLSPAGLTERVRKV

SEQ ID NO: 94 - protein, 752 aa, synthetic construct
  REGION 1..752: note = MG44-94 effector
MRKSDEKITPWNFRDVVDEAASNEEFMRRMTNKCTYLHGVDVLPKCSIAYQKFNTLNQINKLKVNDCAISVPLKQKIFAELFLVKPRVSDKMIASLIVREGAVAPGDSVVLSGKDGGDIKSSMSSYIQLKRILGDFVDYDLASGGNVCENIILWHTLNTDKRLVEDLIVKNYGDNPAVAPYVKQLKGLVFNDFGKLSGRLLTELEVVDKQTGELCTVTDLLWNTNENFNELMFDKRYNLEEVIAAENEDDNDKVDYREVQKLYVSPAVRRGIWQSLQMVDEYVAALGKEPDKVFVEVSREEGVKGDKGRTHSRKKQLLEKYKNINPKDVENIDELTGELNSDKISDMRLRQERLYLYFRQLGRCMYSGEPIDLDHINDSKLYDVDHILPRSYIKDDSLDNKVLVLRSKNAEKSDTYPLPLGFTNQQGWWKMLRAKDLISSGTYDRLMRTAPLTDDDYNDFINRQKVITDQTSKAVIELLKRKYPGATLVYSKEVNVADFKSKFDLYKCRETNDLHHARDAYLNVVVGNVYSTVFGVRIETYVKDGEKWKTYNLKKMFTRDVPGAWNENSIRTVKGVYNSSSMCVTRYAYCNKGAFYKQTVYSGNENITAPRKGKGPLANMERYGGYMTQSTAYFAIVESQGKKGRIKTIEAVPVMVDYQSRNDPDRVVEYFEENGLVDVKLIVPKIKIKQLVSYNGSRVYLAGVGDVRILVHNATELFVDNKIDDYVNQLLKIVEMAKQPTFNKNSDCYGGY

SEQ ID NO: 95 - protein, 1347 aa, synthetic construct
  REGION 1..1347: note = MG44-95 effector
MEKEQKFYLGLDIGTNSVGIACTDENYNLLRVKGKDCWAVRLFDEAQTAADRRTARTARRRLQRRRYRINQLQGLFAPFMQDNLFFLRLNNSQFFADDKAGELDGDVNNLFADSGFTDRNFHEKYPTIYHLRFALQQSPVDDIRLYYLALHHIIKYRGHFLYDGNVSEVRDVHKLFDALNTVCENTFAENTPHFDIEKADEAKDMLLRSKGKLKDTVKSIKQLFSVQNDDCGKIRTEIINGFCGAKFSPEKLLGDAYSEEKSFAFRDVNEDAFEAMQSTYGDDFALLKAMREIYNFVTFERLFNGQPSISSAMIAVYDKHKSDLKKLKGFIKKNYDTDGGKKCREMFSDVTQKANYVNYVGHVGYGKSRKRVKTCDYDSFIAYVKKFLIDGNFAHDETYDEIMAEIEAKTFLPKILHSDNGLVPHQVNEDELVKIVAQMVRAFPETAQMASKILPLFLFCIPYYVGPLVGSNSWAVRKSDEKITPWNFRDVVDEAASNEEFMRRMTNKCTYLHGVDVLPKCSIAYQKFNTLNQINKLKVNDCAISVPLKQKIFAELFLVKPRVSDKMIASLIVREGAVAPGDSVVLSGKDGGDIKASMSSYIQLKRILGDFVDYDLASGGNVCENIILWHTLNTDKRLVEDLIVKNYSDNPAVAPYVKQLKGLVFNDFGKLSGRLLTELGVVDKQTGELCTVTDLLWNTNENFNELMFDKRYNLEEVIAAENNDDDGKVDYEDVQKLYVSPAVRRGIWQSLQMVDEYVAALGKEPDKVFVEVSREEGVKGDKGRTHSRKKQLLEKYKNIDPKDVENIDELTGELNSDKISDMRLRQERLYLYFRQLGRCMYSGEPIDLDHINDSKLYDVDHILPRSYIKDDGLDNKVLVLRSKNAEKSDTYPLPLGFTNQQGWWKMLRAKDLISSGTYDRLMRTAPLTDDDYNDFINRQKVITDQTSKAVIELLKRKYPGAALVYSKAVNVADFKSKFDLYKCRETNDLHHARDAYLNVVVGNVYSTVFGVRIETYVKDGEKWKTYNLKKMFTRDVPGAWNENSIRTVKGVYNSSSMCVTRYAYCNKGAFYKQTVYSGNENITAPRKGKGPLANMERYGGYMTQSTAYFAIVESQGKKGRIKTIEAVPVMVDYQSRNDPDRVVKYFEENGLVDVKLIVPKIKIKQLVSYNGSRVWLAGITGPSIIVHNATELFTDNRTDMYVKQFVKLLEMAKNPTFDVNCEKYELTPNRERGEKITINRESNIKLYDFFLSKFDCSKFKGVSSYVTFGKNLSIGREKFVALTVSQQVNVLNQIVNFFKCNAETADIELIGGSKISGKILFNKNITDVDFRIISQSPCGLTVHVKRV

SEQ ID NO: 96 - protein, 1334 aa, synthetic construct
  REGION 1..1334: note = MG44-96 effector
MEKFYLGTDIGTNSVGIACTDENYELIRAKGKDCWAVRLFDESKTAETRRNFRTSRRRLERRKQRISWLQALFAPYINDETFFIRLNNSQFLPEDKDEILQADKNALFGDEGYTDKDYHAEFPTIYHLREKLIEGGKYDLKLYYLAIHHIVKYRGHFLFEGATMEEIRDIKRLFENLNSVWEATYAENVPHINLAKSDEAKEILLDTKKGLRDKQIALEKLFGENTALMKESIKAMLGGKISPETLFGEEYKEEKSFSFKDMDEEAFDALQSTYGDNFECLNALRSIYNFVAFEKLLCGHKNISSAMIAVYNKHAADLSLLKSFIRSERPNDYNKIFKSTIEKANYVNYIGYTKKGGEKKKVAKCKSDDEFFAYMKKYLSSLDDIKDGATRDKILGEIENGSFLPKILHSDKGLFPRQVNEAELKAIASNMVKYYPETKEIADKIIPLFEYRIPYFVGPLAGVNSWAVRKSGEITPWNIGEKIDLAASNEEFMRKMTSKCSYIFGEDVLPKCSIIYQKFDVLNQLNKLRVNDRPLTVDLKKGIFDELFLKYPKVSDKKIKDYLIRNGHFSPTDGEITLSGKDGEFKASMSSYIQLKRVLGDFVDKDLKNGGEVCENIILWHTLNTDKKIVYDLIEKRYKNIPEIADNVKALKGLSFKNFGRLSKKFLVDLYSADNETGELVNILDVLYETNENLNEILNDEKYAFGKLVDEANGAADSKITYEDIEKLYISPAVRRGIWQTVTMIDEYVEAIGRTPDKIFVEVTREEGVKGDAGRTQPRKRQLQEKYKNISETYADVISELGDEKYSDMKLRQERLFLYFRQLGRCMYSGQRIDLDRLDTDTYDVDHILPRTFIKDDSLDNKVLVLRSKNAEKADRYPLPQGFSGQQDFWKMLLDKNLIAKTTYDRLTRTEPLGDNDYKDFINRQKVITDQTVKAVAELMKRKYPTAKIVYSKAKNVNDFKNKFDIFKCRETNDLHHARDAYLNVVVGNVYDTVFSNPLDMFRKDGDMWRTYNLKKLFTRDVKGAWDCSRIARIKSICGSHTMAVTRYAYCNKGEFYNQTVYGKDDAGVSSPRKSNGPLSDTKKYGGYKSQTTAYFAIVSSLDKKGNRVKTIEAVPVLVAYRLKNNPKAVEEYFNSYLKSPEILIPKIKNKQLVSYNGSYAYIAGVTGNQIILHNAAELFTDNKTDEYVNELLKIVDMDAKKMLVGDEPRYVTKTNRYKKEKVVIDKEKNLELYSRLKDKLSDKIYSGLSAFSTFAKNMESGEEKFKELAIVEQAKTLIQILKMFKCNAETSDLKFIGGSSRSGTVSINKKIDGVNFEIIHLSPAGLRVIKNKV

SEQ ID NO: 97 - protein, 1337 aa, synthetic construct
  REGION 1..1337: note = MG44-97 effector
MEKFYIGTDIGTNSAGVACTDENYNLLRVKGKDCWVVRLFDEGKTAVDRRTFRTGRRRLQRRKQRIAWLQDLFVPYMEDETFFIRLNNSQFLPEDKDALLGGDKNTLFAGVYDDKKFHAEFPTVYHLREALMRGGVNDLRLYYLALHHIVKYRGHFLTEGSVDDVRDFGRLLGNLNGVISDVYGDEVPLFSEASSSEVKNILLDKTLGIKDRSTELEKIFGVKDKTSKEIIKGLCGGKISPAVLFGDEYKEEKSFSFKEITDENFEGMRATYGDDFALLEGIRSVYGYVTFEKLLSDHTDLSSAMMDVYDKHKKDLLALKAFIRSERPEDYNKIFKSTDEKYNYVNYIGYTKKGGDKKKVKKCKDDEFYAYIKKYLQGLTDVKDIAARDKFLKDIEAGSFMQKILHSDNGLFPKQINEYELKKILENMVKSFPATAEIKDKIVTLFNYRIPYYVGPLAGKEETCWAVKKSNEKITPWNFDDVIDKAKSNEKFMLRMTNKCSYLRGEDVLPKASIIYQKFDTLNQLNKLRVNDELLTVDLKQKIFNELFLKYPKVSDKKIIDLLVREGKISQNDRSEVTLSGKDGEFKASMSSYIHLKNILGDFVDKDLSENGGVCENIILWHTLNTDKNIVVDLIKENYGKIPEIKNAIKQLKGLVFHDFGRLSRKLLCEIYTVKEDTGELWNVLDALYETNENLNELLNDEKFSFGRNIKEENGEMTSDVGYKDVEELYVSPAVRRGIWQTLTVVDEYVKAIGKAPDKIFVEVTREDGIKGDAGRTQSRKRRLQEKFRTVSDAYADVITELGEERFTDLKLRQERLFLYFRQLGRCMYTGERIDLNNINDVTRYDVDHILPRTFIKDDSLDNKVLVLRSKNAKKSDTYPLPAGFSNQRDFWKMLLDKGLIAKVTYDRLTRTEPLREDEYQDFINRQKVITDQTVKVVAELFKRRYPTAKIVYSKAKNVNDFKQKFDLFKCRETNDLHHARDAYLNVVVGNVYDTVFTTPMSMYRKDGDVWRTYNLNKLFTRDVKGAWDNAQSIATVKKVYSKNSMVVTRYATCNNGGFYDQTIYGKEEKGITAPRKGKGPLSDSSKYGGYMTQPTAYFAVVSSKDKNGNEIKTIEAVPVLTTYMAKNDPKAVERYFSERLKDAKIIVPKIKGKQLVSYNGTQCYLAGTTGKQILVHNAVQLFTDGKTDEYVNSLLKLADMKAKGVINVGQEEFVMKTNRDGERKLVIDRANNADLYGMLKRKLERENYAGLSAFATFRKNLEKGEEKFNSLTVYEQTVVLLQILKFFKCNAETADITLIGGSGRSGVISINKSVTDVDFRLIDLSPAGLIERVRKV

SEQ ID NO: 98 - protein, 1347 aa, synthetic construct
  REGION 1..1347: note = MG44-98 effector
MEKEQKFYLGLDIGTNSVGIACTDENYNLLRVKGKDCWAVRLFDEAQTAADRRTARTARRRLQRRRYRINQLQGLFAPFMQDNLFFLRLNNSQFFADDKAGELDGDVNNLFADSGFTDRNFHEKYPTIYHLRFALQQSPVDDIRLYYLALHHIIKYRGHFLYDGNVSEVRDVHKLFDALNTVCENTFAENTPHFDIEKADEAKDMLLRSKGKLRDTVKSIKQLFSVQNDDCGKIRTEIINGFCGAKFSPEKLLGDAYSEEKSFAFRDVEEDAFEAMQSTYGDDFALLKAMREIYNFVTFERLFNGQPNISSAMIAVYDKHKSDLKKLKGFIKKNYDTDGGKKCREMFSDVTQKANYVNYVGHVGYGKSRKRVKTCDYDSFIAYVKKFLMDGNFAHDETYDEIMAEIEAKTFLPKILHSDNGLVPHQVNEDELVKIVAQMVRAFPETAQMASKILPLFLFRIPYYVGPLVGSNSWAVRKSDEKITPWNFRDVVDEAASNEEFMRRMTNKCTYLHGVDVLPKCSIAYQKFNTLNQINKLKVNDCAISVPLKQKIFAELFLVKPRVSDKMIASLIVREGAVAPGDSVVLSGKDGGDIKASMSSYIQLKRILGDFVDYDLASGGNVCENIILWHTLNTDKRLVEDLIVKNYGDNPAVAPYVKQLKGLVFNDFGKLSGRLLTELEVVDKQTGELCTVTDLLWNTNENFNELMFDKRYNLEEVIAAENEDDNDKVDYREVQKLYVSPAVRRGIWQSLQMVDEYVAALGKEPDKVFVEVSREEGVKGDKGRTHSRKKQLLEKYKNINPKDVENIDELTGELNSDKISDMRLRQERLYLYFRQLGRCMYSGEPIDLDHINDSKLYDVDHILPRSYIKDDSLDNKVLVLRSKNAEKSDTYPLPLGFTNQQGWWKMLRAKDLISSGTYDRLMRTAPLTDDDYNDFINRQKVIADQTSKAVIELLKRKYPGATLVYSKAVNVADFKSKFDLYKCRETNDLHHARDAYLNVVVGNVYSTVFGVRIETYVKDGEKWKAYNLKKMFTRDVPDAWNENSIRTVKGVYNSSSMCVTRYAYCNKGAFYKQTVYSGNENITAPRKGKGPLANMERYGGYMTQSTAYFAIVESQGKKGRIKTIEAVPVMVDYQSRNDPDRVVKYFEENGLVDVKLIVPKIKIKQLVSYNGSRVYLAGVGDVRILVHNATELFVDNKIDDYVNQLLKIVEMAKQPTFNKNSDCYIVKTNRMGDIKLVVDKGSNVKLYDELILKLECKQFQGFGAYTSFRNVLTESREKFVDLSTLEQAIVLLEVLKFFKNNADTADLSLIGESKRAGILRFSKNITDVDFRIISQSPCGLTVHIKRV

SEQ ID NO: 99 - protein, 1347 aa, synthetic construct
  REGION 1..1347: note = MG44-99 effector
MEKEQKFYLGLDIGTNSVGIACTDENYNLLRVKGKDCWAVRLFDEAQTAADRRTARTARRRLQRRRYRINQLQGLFAPFMQDNLFFLRLNNSQFFADDKAGELDGDVNNLFADSGFTDRKFHEKYPTIYHLRFALQQSPVDDIRLYYLALHHIIKYRGHFLYDGNVSEVRDVHKLFDALNTVCENTFAENTPHFDIEKADEAKDMLLRSKGKLKDTVKSIKQLFSVQNDDCGKIRTEIINGFCGAKFSPEKLLGDAYSEEKSFAFRDVEEDAFEAMQSTYGDDFALLKAMREIYNFVTFERLFNGQPNISSAMIAVYDKHKSDLKKLKGFIKKNYDTDGGKKCREMFSDVTQKTNYVNYVGHVGYGKSRKRVKTCDYDSFIAYVKKFLMDGNFAHDETYDEIMAEIEAKTFLPKILHSDNGLVPHQVNEDELVKIVAQMVRAFPETAQMASKILPLFLFRIPYYVGPLVGSNSWAVRKSDEKITPWNFRDVVDEAASNEEFMRRMTNKCTYLHGVDVLPKCSIAYQKFNTLNQINKLKVNDCAISVPLKQKIFAELFLVKPRVSDKMIASLIVREGAVAPGDSVVLSGKDGGDIKASMSSYIQLKRILGDFVDYDLASGGNVCENIILWHTLNTDKRLVEDLIVKNYGDNPAVAPYVKQLKGLVFNDFGKLSGRLLTELEVVDKQTGELCTVTDLLWNTNENFNELMFDKRYNLEEVIAAENEDDNDKVDYREVQKLYVSPAVRRGIWQSLQMVDEYVAALGKEPDKVFVEVSREEGVKGDKGRTHSRKKQLLEKYKNINPKDVENIDELTGELNSDKISDMRLRQERLYLYFRQLGRCMYSGEPIDLDHINDSKLYDVDHILPRSYIKDDSLDNKVLVLRSKNAEKSDTYPLPLGFTNQQGWWKMLRAKDLISSGTYDRLMRTAPLTDDDYNDFINRQKVITDQTSKAVIELLKRKYPGATLVYSKEVNVADFKSKFDLYKCRETNDLHHARDAYLNVVVGNVYSTVFGVRIETYVKDGEKWKTYNLKKMFTRDVPGAWNENSIRTVKGVYNSSSMCVTRYAYCNKGAFYKQTVYSGNENITAPRKGKGPLANMERYGGYMTQSTAYFAIVESQGKKGRIKTIEAVPVMVDYQSRNDPDRVVEYFEENGLVDVKLIVPKIKIKQLVSYNGSRVYLAGVGDVRILVHNATELFVDNKIDDYVNQLLKIVEMAKQPTFNKNSDCYIVKTNRMGDIKLVVDKGSNVKLYDELILKLECKQFQGFGAYTSFRNVLTESREKFVDLSTLEQAIVLLEVLKFFKNNADTADLSLIGESKRAGILRFSKNITDVDFRIISQSPCGLTVHIKRV

SEQ ID NO: 100 - protein, 1336 aa, synthetic construct
  REGION 1..1336: note = MG44-100 effector
MEKFYMGADIGTNSVGIACTDENYNLLRIKGKDCWTVRLFDECKTAEERRGFRTSRRRTARRKQRINFLQSLFAPYMNDKTFFIRLNNSQFLPEDKSELLHGDKNTLFSGDYDDKKFHAEFPTIYHLRDKLMSGGIYDLRLYYLALHHIIKYRGHFLFEGSMEDVRDLGKLLNALNDAMVGVYGDELSLFDKSVAEEAKSVLLDDKLKIRDKQIGLEKVFRVDDKIRKEIIKGLCGGKISPSILFGDEYKDEKNFSFKEISDEIFESMRDTYGDDFGLLCAIRSVYGFVTFEKLLEGHSSLSAAMIAVYEKHKNDLKRLKSFIKSERPEDYNKIFKSTEEKCNYVNYVGYTKKGGDKKKVKKCKDDEFYAYLKKYLSGLDDVKDAETRNAIIEEIEDGKFLPKILHSDNGLFPRQINESELNKIVGNMVKAYPETAAVEEKILTLFRFRIPYYVGPLSGENSWAVRKSDDKITPWNFYDVIDAAKSNEEFMRRMTNKCAYLQGEDVLPKASVLYQKFDTLNQLNKLRVNDEIISVELKKKIYNELFLVYPKVSDKKIKELLVREGRISPSDVNDTVLSGKDGEFKASMSSYIRLKKILGDFVDKDLSENGGVIENIILWHTLNTDKSIVENLIKSNYGKIPEIKNALPQLKGLTFNDFGRLSAKLLSGIYTVIAETGELRNIIDTLYETNENLNEILNDERYEFGRIINEENGQADEEVTYETVKKLYVSPAVRRGIWQAMSVTDEYVRAIGRAPDKIFIEVTRTDGKKGDAGRTQPRKRRLQEKFKALCNDGAFDDIIAELDDEKYTDMRLRQERLYLYFRQLGRCMYTGQRISLDDINDTNLYDVDHILPRTFIKDDSLDNKVLVLRSKNAQKSDTYPLPAGFSDQRGFWKLLLDKGLIEKVTYDRLTRTEPLREDEYRDFINRQKVITDQTVKAVAELMRRKYPTAKIVYSKAKNVSDFRKKFKLFKCRETNDLHHARDAYLNVVVGNVYDTVFSTPMAMFRKDGDVWRNYNLKKLFTREVKFAWNESSIAIVKKTYARPSMTVTRYAVCAKGGFYDQTIYGKGERGITAPRKANGPLSDMSKYGGYKSQSTAYFAIVSSTDKKGNKIKTIEAVPVLTAYQAKTDNKAVEKYFADRLSTPEIIVPKLKIKQLISFNGTPCYLAGITGKQIIVHSAVQLFTDNKTDDYVNSLLNLEDMKSKKAVNVGDEEFLMKTDHTGAEKLVIDKATNIALYRDLMRRLGLKIYSGISAFATFAKNMENGEDKFISLTVCDQATVLLQILKFFKCNAEISDITLIGGSGKSGTVLLNKNITDVDFEIINLSPAGLIERVRKV

SEQ ID NO: 101 - protein, 1420 aa, synthetic construct
  REGION 1..1420: note = MG44-101 effector
MSNYNNFKKYGDYYIGLDVGTGSCGWAVTDTSYNILKVSGKSLWGVRLFPTADTAAERRSHRCARRRVFRNRQRLNLLEQLFDSEISKVDVGFFQRLKNSEFKEISKNNLFGDCTYNDKDFFKEYPTIYHLRYKLMNEPIDDIRLLFLAVHHIIKQRGHFLFENVNNIGASLPELWEQCCSQFVDISLFSNLSEDYLDIAESLKQNLIDMRDDVINVIKTSSDKKADLNKVFAQLKSVYDEISDYEVKKTIENRVNKWFLLLLGYKVSAVEIFSIDESDEEGSSCKIQINSSDYDEQLLKIKDEFKGVVESEKAVYDVIKLQEILKGCKSISEAKVKLYNKHAEELRIFKNLLRERLSEKILIEVNKNVKVANNEKLTSDPKSFYKEIFEERNKNTEKGKICFYYDITHGDKSANKEAIKGSSIYKRLQILAQILLCSSEIYKLSEKEKVLLHRIGDLSIFETQVSADNSVIPYQINLAELDKILKVQSKNFAFLSEKDDAGVLVYDKIKALLTFRIPYYVGPLNNHSKFSWIVKKSQEKIVPWNFESVVDTEKSAEAFIKRMTSKCTYLSGEDVLPKNSIIYSKFMVLNVLNNIRINGMRLDEAQTGLTKKVFDELYCNQINVTQKQLVAYLYNNGFLTSKEELTGFDDEQKVSMSSYVKIKNALGTGNFDINFAESFIKYSTLFPNDYLMIEKILKREFSSECAKFNENLSKLCRIKFSGWGRLSEKLLTGLLGHNKNSEFDKNSILGFMLNGKGNLMELLSSEYTFSDLISSENSTLDKNDAFSYQNLVEGLYVSPSVKRMIWQTLLVVREITKKIMGYEPSRIFVEMARGDTADQKGKRTNSRKKSILALYDKCRQDFDISDLSSKLENEKDSKLLSDKIYLYYTQLGKSVYTGKEIKIDEFDLYDIDHIIPQSLTKDDSLDNRVLVEKEINQNDKKNRYPLSSEIQENQKQFWKHLLDLGLISKSKFERLIRSTPLSNSEKEGFIARQLVETRQSTKAIAGLLSKLYKTAKIIYPKAGLTADFKQRFDLIKVRELNDLHHAKDAYCNIVVGNVYYEKFTSNYLYVIENNEPYSFSTSDKSYIFTKQNEKRLQETGTWDSRNGKSISIVKKYYKRNNILMTYKQEERIGALFNQTLYGPEKGTIPKKKNMSCQDYGGYDSDQNSFFSFISYKDDKANLKTKLIGIPLRVVYGLSDKASAISHYLLTEKANEYREPKVLIDFLPFNFILKDNETGFLARVVSFASKGKQLEIKQFNPLVLDEKNLKPLKAIEKFVSRLKNKSIKIKYEKDKSGFTDEDLSSIYSELKDKSKNSVFKNLPKPIVKMLSDVDINNYKYQESEKSEPKLLTIEQKAVAICELIKTFHTESSNLLFLGEKKGSGVKRIKTVLDLEKTDYSILCSSITGFYEKEIRLRDLLK

SEQ ID NO: 102 - protein, 1417 aa, synthetic construct
  REGION 1..1417: note = MG44-102 effector
MNKEIYLGLDIGTNSCGYAVTDSNYNLVRIAGHDAWGVRLFEEAQTAKERRINRATRRRIVRKKLQNNWLQELFKSEVEKVDPSFFTRLKFSNLDKEDKEKSDKNLTSKYSLFNDMVEEIFTDKQYYDKYKTVYHLRKSLLTNPAEDIRLLYLAVHSILTHRGHFLYETDFSNNQSNDTLKTDFVSLLEKLKTYGEENFDAKNNLTLTGDKANCVMSLIKDFDDGLPYKQIKENFETELGVKTKLDKTLASILISGKFKTSDIFDVDKEDAIKIDFNDANFEEQYGEIISSLKDVEVEILTLLQAIYANIQLKKLLGENNYICQAMVERYEKHNKQLQELKKFVKTYFPSKKKIIFNAGHKPSKNGKNEKKENTQYNNYAAYCYSDLCSGKKRVLYKKASQEDFYKFLKSELFECDVENNVELDKYEERKQNILNAIEKNDFLLKLRSNDNILLPNSLYQAELKQILKVSAQKFNFLNNKDADGRSVGQKIIDVVSFRVPYFVGPIGESENGWIRKDKSADFKPWTLDKIIDLDEAENRFIQNMTNKCTYLPTEDVLPQKSLLYSKFRVLNELNNLKINGNAIAVETKQQIFDGLFKKTPKVSTKKLVEFLKQNNIINKNDSNVVFTGIDKEFANDYSSYVTFATKFGEKFVNKNLEVFEKIIKYHTIISDKSRLAKRIKREFNIFSDEDIKFLKSLNFSGWGSLSQKFLEGLKFSDKKSANPEMETLTVMSALWETNKNLQEIIFCKTYDLQQKLDANIQKIQRDLLYDDIQNMYTSPAVKRGTWQAISIINELKNKLGKYPDKIFVEVTRNNQEKGEAGRKDSRHKMVVKKYKDKQLKLDCQKLCIEFNKLMEELNQKDNSNLRSEKLYLYFMQLGKDIYTGKPIDISQLNNDSMYNVDHIIPRCKVKDDSIDNKVLVSAAANLAKSDNYPIDGHIQASQKAFWELLRENGLMTDSKLARLQRTEEFTEKDADNFTNQQLVSTNQESKAVIDLLSKVYSNKRNIIFSKAMFVSDFRKNFDINKSRDVNALHHAQDAYLNVVVGNVLFNRFTEGYWKKNTQENNNQTEDKNANTTSVVEKLFRRTVWSNQTGEVVWKGQQSIDLVRKNCEKNSPCISIMPYENKNGMFYNATVYKSSKNHSATPASFALKAKGPLSSIDKYGGYNSLKNAYFIAVESVDANGTVNKTIETVPIIVEYQHRNDANKTQKIIEYIEKTNNIKITKVIKDKIKYRSLLKIDGGLYMLTAKTNDSLKLLKLNQWFLSNKDIGYIKILEKYQNMPATIKELLKTTDEEIIVSPAVKTNSKQLAISRTNNVYLYDLIVAQLGKKIYNLSSISGLVKKLTNARSVFLSLSISAQAELLLGLVKYVGGAYNVDLALLGESQHAGSTTIGKNISNLNISLIEQSVTGLYAKETVL

SEQ ID NO: 103 - protein, 1402 aa, synthetic construct
  REGION 1..1402: note = MG44-103 effector
MQEIKNYFLGLDIGTNSVGYAATDENYRLLSKRGKDLWGVELFDTAETAQERRTARGARRLRGREKVRISLLQELFAKEIAKVDDKFFIRLKASALWEDDKEASGIFSRNSLFFENSLTDKDFFKKYPTIYHLRRKLTTEPAEDVRFLYLAIANMMKHRGNFLFDSFSTNNDGDNLATLFKNLKNTISQKDDDGLAMLEFSVGEEQSKALDALDELIAKKPFKTSALVEEFKNIFGEMNSNQKALLSAICGGTVNAKTIFSSKTNELNLTAKLDSFNVDDAAFDTFLVELEGENEAASTIIAQAKAIYDHIIFKRLMGGHNFVCDALVEKFELHKTQLKNFKEVIKKYYKDKYKEVFKENRNGLNNYAKYIDGTNRDAAKDDKKMANKCTRADFYKYIKSVLNQNPEAQNLSEVAEILSSIDENNFLPKLRTSANSVIPYQVNSAELNAILNKSKEKFTFLNETDEDGLSVAGKIISIFEFRIPYFVGPLSKNGSKNAWIERRTDEKIMPWNIKEVVDFDKSEQAFIKRMQNNCTYLRGEACLPKNSLLYSEYMVLNELNNIRINKTYPLSQSLKEKIIEVMKTVGAPKLKDIKTMVYGEGKIKPEDEVVITGVDGKLNSNLNIYKNFNAILDGEIEKYREEVEDIILHASYTSDKTRLYDWLKKTYGKTFSEAQIKTMKGLKIEGFGKFSRKLLDGIIGVDTKTGESHTIIEWLRCTNLNFMEIINAFDFGDAFANPSVVGAITYDDVSGLYCSPSVKRGVWQAIKIIREMQKIGGGAPRKIFVEVTRADDEAKKGKAPDSRKDRMIKVYNSIKKAFDDSVNDLKTQLTQEENLNSDKLYLYYTQLGKCAYTGKTIDVNMLFSNAYDIDHIIPRSKVKDDSLDNKVLVLRDVNIDKANRVLTPEIQANMKPFWQLLNSYNLISNEKLARLLRTREYSEDEQKDFAASQLVSTNQSAKAVIELIKAFMPKTAVVYSKAKLVTEFRNGEFKFENGADLKDLSGGAELKMALIKNRELNNFHHAKDAYLNIVVGNVFDEKYSKRFYLRNSGKVNYNVCNAFTKEIAGVFNQNLHLPIIKEVMLSNTPHVSFLAREETGAFYKETRWGSEKHQKDFKNVDEIRAYASQFKRGEWDASAIALKGESAPLSQTIKYGSYHEAKYAYFSVVDYISKKKKQRKFVAIPYFFAKDIKAEADLIGVIKKLEKVDDVKIVIPKVKIGTIIKVGSGRFKVAGKSGEQMKLHNFNEIYLEPEFNEYFKLLSKTLKLMGEKKPLRIEGEAVVVNINRFGEKAMLTKPENLVLYKALVGHMRKAIYKETSLNSTAKSLKENAATFEGLTIENQLVALQGVLNILTGKSGGDISLVGGSRRSGELNIPLNVSNKKPLSLVFESPTGYFVKEVSLNGV

SEQ ID NO: 104 - protein, 1464 aa, synthetic construct
  REGION 1..1464: note = MG44-104 effector
MENKEIYFGFDMGTENIGFAVCDENYKVKKVNGRKAWGVRFFDTAETAVQRRTYRAARRRLERRKYRITLLQELFYEEIKKKDPNFFFKLNENDLHLEDKEYKTKYSLFNDENFTDKQFYKKYPTIYHLRNALMNEPASDIRLLYLAIHHIVKYRGNFLRSGEINDVTGASEFFEALNNALENLSSEVNDFDNDQKITDIGKFDLSRLNELTSLVKDNTIKRRDKILKAKELLSSKNTSQNKIIEAIFGGVVNVEQIFGKDKYDVESLSKAKFYLSEEVEEFSPILEGGLNPTDYEIIVCMKNIYDWQVLLSLLKGKSTLSEAMVDTYNEHKKDLKNLKYIVEKYLPSEKDAMFGEPSTNGKIDDKIDNYTKYIGGGYYGGAKLGRKYEDGKLVVDTSVVSRNGRLGKTCTKEDFYKYVNKLLKNITIDENDEKGKRILEDIKSRIENGDFMPKIVSKDNATIPYQLNENELNKIIEVNKEKYPFLLSADDGIAVSKKIKSLLTFRMPYYVGPVKENANSKNVWAVRKESGRVTPWNLSDKIDLNESREKFITRMTCKCTYLKNEDVLPKNSVLFSKYVALNELNKLKVNDKEINVDLKQKIFNEVYLNKTVNRKNIVKCIKNITGNDVTLSGIDENLHGNMNTYQKMKKVIGDKVDKYPDMVEDIVKILTIFADDSKAVEELLKERYSSILSVDEIKKLKDFKYSGWGSFSRGLLQGSAMGTHGIMLTDSQGNLKDIIDIMWETNQNFVEIINNEEYDFADAVRGYEKENEIPENLDITYDDVEELYCSPSVKRSIWQAFLMTKELVKLCGVPRKIFIETTRSNTDEKKGTRTQSRKEQITAMYEEAKKQDKYLYKEEIAEMMTKADKKSNGELNSEKIFLYFMQLGKDIYSGKPIDIDQLRDYDVDHIIPQSQVKDDSLNNKVLVHKTLNGKKDNTYPLPSEFRQPALWDNLKKLKLLSDEKYHRLTRTTRISDLEKEKFINRQLVETSQMVKLTRDILERYFEGITGEKKAVEIVMSKAGNVSDFRNDYGLTKSREINDFHHACDAYLNIVVGNVLNEKFSHNKDYRDNQSDKTVDKSYNFRKAFYSSVYSNREKRYVWTAQNKDGYYPTINVVKKELESFDFAMSKKLTTGKGQLYKETIFKAEDNPNMYSRVEKVDKNGVINPRADVTKYGGLKTSGTAYFVVVDSEEKKGKNKGQKRRSIIDIPIYYAKRIENGKTTINEYLETNPRVNLYKPTLAKIEGLNGSKLMAGALLDFGNYKLRLAGSNEITLLFHNANELFVSKEINDYVKELSLVNEKINKEFIKRKTDKGELSDDEFRRKLFVEQEEEKTRRENDSDQKNKSKILHVTKEKNNELYDLFLDKVSNEKSPYAYLPAYSSFKNTLEKGKEIFYQMDEYNGLRCLLNLIVAFQCNARNVDASNVGGGKYMCNIATSKDITDKSVTFISQSVTGLKEKRIKIN

SEQ ID NO: 105 - protein, 1337 aa, synthetic construct
  REGION 1..1337: note = MG44-105 effector
MEKFYIGTDIGTNSAGVACTDENYNLLRVKGKDCWAVRLFDEGKTAVDRRTFRTGRRRLQRRKQRIAWLQDLFAPYMEDETFFIRLNNSQFLPEDKDALLGGDKNTLFAGVYDDKKFHAEFPTVYHLREALMRGGVNDLRLYYLALHHIVKYRGHFLTEGSVDDVRDFGRLLGNLNGVISDVYGDEVPLFSEASSSEVKNILLDKTLGIKDRSSKLEKIFGVSDKTSKEIIKGMCGGKISPAVLFGDEYKEEKSFSFKEITDDNFESMRGTYGDNFTVLEVIRSIYGYVIIENLLSGHDDLSSAMIAVYDKHKDDLLALKAFIRSERPEDYNKIFKSTDEKYNYVNYIGYTKKGGDKKKVKKCKDDEFYAYIKKYLQGLTDVKDVAARDKFLKDIEAGSFMPKILHSDNGLFPRQINEVELKKILGNMVKSFPATAEIKDKIVTLFNYRIPYYVGPLAGKEETCWAVKKRNEKITPWNFDDVIDKAKSNEKFMLRMTNKCSYLRGEDVLPKASIIYQKFDTLNQLNKLRVNDELLTVDLKQKIFNELFLKYPKVSDKKIIDLLVREGKISQNDRSEVTLSGKDGEFKASMSSYIHLKNILGDFVDKDLSENGGVCENIILWHTLNTDKNIVVDLIKENYGKIPEIKNAIKQLKGLVFHDFGRLSRKLLCEIYTVKEDTGELWNVLDALYETNENLNELLNDEKFSFGRNIKEENGEMTSDVGYKDVEELYVSPAVRRGIWQTLTVVDEYVKAIGKAPDKIFVEVTREDGIKGDAGRTQSRKRRLQEKFRTVSDAYADVIAELGEERFTDLKLRQERLFLYFRQLGRCMYTGERIDLNSINDVTRYDVDHILPRTFIKDDSLDNKVLVLRSKNAKKSDTYPLPAGFSNQRDFWKMLLDKGLIAKVTYDRLTRNEPLREDEYQDFINRQKVITDQTVKVVAELFKRRYPTAKIVYSKAKNVNDFKQKFDLFKCRETNDLHHARDAYLNVVVGNVYDTVFTTPMSMYRKDGDVWRTYNLNKLFTRDVKGAWDNAQSIATVKKVYSKNSMVVTRYATCNSGGFYDQTIYGKDEKGITAPRKGKGSLSDSSKYGGYMTQPTAYFAVVSSKDKNGNEIKTIEAVPVLTAYMAKNDPKAVERYFSERLKDAKIIVPKIKIKQLASYNGTLCCLAGITDNRILVHNAVELFTDGKTDEYVNSLLKLADMKAKGVINVGQEEFVMKTNRDGERKLVIDRANNADLYGMLKRKLERENYAGLSAFATFRKNLEKGEEKFNSLTVYEQTVVLLQVLKFFKCNAETADTTLVGGSTKSGSIKFNNNITNVDFRLIDLSPAGLTERVRKV

SEQ ID NO: 106 - protein, 1416 aa, synthetic construct
  REGION 1..1416: note = MG44-106 effector
MEEIYLGLDIGTNSCGYAVTDGNYNLVRIGGKDAWGVRLFEKAETAQERRAKRTARRRVVRKKLQNLWLQQLFEKEIEKIDPSFFTRLKYSNLHLEDKILSDKNLTSKYSLFNDTVKQVFTDKEYYEKYKTVYHLREKLLKNPAEDVRLLYLAIHSILTHRGHFLSETDFSSNVPIEDSYNCLLDKLSAYSVEFNDSKNGLTIKPDKISGIFLLLEDFAQGLPFRQVKENFEKNLDVKTKLDKTVASILLSGKFKTTDVFAVEKEDAVKVDFNDEKFEEVYGTLSGQLSETELAILNLLKDIYSNIQLKKLLGKNNYICEAMVERYDKHNEQLKELKSFVKTYFPSKKNLVFNAQKTSKKKKEEKSGKIANYAAYCYSDLKDGKKQIIDGVASREDFYKFIKNELLECSPEVETDLIKFEEQKQKILNSIEKNDYLLKIRSHDNIVLPNSLYKVELQQILKINEKKFKFLSEKDEKGKTISEKIVDIICFKIPYFVGPIGQSERGWIRKDKNLDFKPWTLNEIINFDEAEDKFIQNMTSKCTYLPTEDVLPKDSLLYSKFRVLNELNNLKVNGNDITVETKQRIFKGLFEKYKKISKNKLIEFLKQENIYPKNESIVITGIDNEFANNYSSYVTLANKFGEEFVNKNYDVFEKIIKYHTIISDKLRLEKRIKREFKIFSNEDVKFLKSLNYSGWGKLSGKFLNGIKFADKKSNSPEFESKTIISAMWETNKNLQEVIFCKEYNLLEKLEANIEKIQRDLVYEDVQNMYTSPSVKRGTWQAISIINELKSKLGKYPDKIFIEVTRNDQEKGDKGRKDSRFGAVVKKYKDKTLKEDCLKEAINYNNLLDELNKRNNSHLRSEKLFLYFMQLGKDAYTGEPIDIAELGNDNAYNVDHIIPRSKVKDDSLDNKVLVSAAANLAKGDEYPLKRKIQFAQKDFWRMLNKNGLMSDKKLARLERTEEFTDKDADDFTNQQLVSTNQESKAVIDLLSKVYDNRRNIVFSKAMFVTEFRNRYNIFKSRDVNDLHHAKDAFLNVVVGNVLFNRFTEGYWKKDKNIKILEDENRVDADEDKNEKVTSVVDKVFGRYVWSNQTGEVVWKGWKDVGRIQKICYQNSPVISIMPYVNRNGAFYDETIYKKKNDGEKFKAAFALKEKGPMSSIEKYGGFNSVNNAYFMVVESVDSKGKVKKTIECVPIIVEYKYRNDPDKKQKIIRYIEETNNIKITRVIKDELKFRSVLKINGGLYMLTAKTGDSFKVLKLNQWYISNSDTGYIKILEKYKNMPQVAKECLKEDGEKLVVSPAVKENSRPQIITRTQNVELYDLIINQLSKKIYDLSSIKAIVSNLKDKRDLFIALSIPNQTEILLNLVKYVGGGYFADLKLLGGTEYMGATTFGKNITDLNIYLIEQSVTGLYSKGTKL

SEQ ID NO: 107 - protein, 1425 aa, synthetic construct
  REGION 1..1425: note = MG44-107 effector
MSNYDNFKKYGDYYIGLDVGTGSCGWAVTDKSYNILKVSGKSLWGVRLFPTADTAAERRAHRCARRRVFRTRQRLNLLEQLFDPEISKVDVGFFQRLKNSEFKEISKNNLFGDNSYKDKDFFKEYPTIYHLRYKLMNEPVDDIRLLFLAVHHIIKHRGHFLFERLDVNNIGASLPELWEQCCSQFVDISLFSNVSDDFQEIADSLKQNLIDMRDDVINVIRTSSDKRSDLKKVFAQLKSVYDEISDPEVKKSTENKVNRWYLLLLGYKVSAAEIFTIEESDEEGLSCKIKFNSSDYDEQIQKINDEFKGVVESEKAVYDVIKLQEILKDCNSISESKVELFNKHAEELRIFKSLLRERLSENLLAEVNKKVNVAKNEKLTTEPKSFYKEIFEERNKNTEKGKICFYYDITHGDKSANKEAIKGSSIYKRLQILAQILLCSSEIYKLSEKEKVLLHRIGDLSIFETQVSADNSVIPYQINLAELDKILKVQSKNFAFLSEKDDAGVSVYDKIKALLTFRIPYYVGPLNNHSKFSWIVKKSQEKIVPWNFESVVDTEKSAESFIKRMTSKCTYLSGEDVLPKNSIIYSKFMVLNVLNNIRINGMRLDEAQTGLTKKVFDELYCNQINVTQKQLVAYLYNNGFLTSKEELTGFDDEQKVSMSSYVKIKNALGTDNFDINFAESFIKYSTLFPNDYLMIDKRLKREFSSECAKFNENLSKLCRIKFSGWGRLSEKLLTGLLGHNKNSEFDKNSILGFMLNGKGNLMELLSSEYTFSDLISSENSTLDKNDAFSYQNLVEGLYVSPSVKRMIWQTLLVVREITKKIMGYEPSRIFVEMARGATADQKGKRTNSRKKSILALYDKCRKDFDISEIYSSLEKQDDNKLLSDKIYLYYTQLGKSMYTGNKIELEDLLNNSKQYDIDHIIPQSLTKDDSIDNRVLVERTVNEVKDNNYPLSYQIRENQTQFWKHLLDLGLISKSKFERLIRSTSLSNSEKEGFIARQLVETRQSTKAIAGLLSKLYKKAKIIYPKAGLTADFKQKFDLIKVRELNDLHHAKDAYCNIVVGNVYFEKFTSKYQYVIANNERYSFSTSDTSYIFTNQNEKRLQQSGTWDSRNGKSISIVKKYYKRNNILMTYKQEERIGALFNQTLYGPEKGTIPKKKNMSCHDYGGYDSDQNSFFSFISYKDDKGNLKTKLIGIPLRVVYGLSDKSSAISHYLLTEKSNEYIDPKVLIDFLPYNFILKDNETGFLARVVSYATKGRQLVLKQFNSLILNEKNNKMLKAIDNFVSRLKNKSFEVKYDKDKSGFTEEDLSSIYSELKDKTKNTVLKALPKTTVKILTDVDINSYQYSENEKSEPKLLSIEQKAVAICEVIKAFHTEPSDLSLLGGKANSGKMCINSVLNLDKDDYSVVFYSITGFYEKELRLSDLLK

SEQ ID NO: 108 - protein, 1337 aa, synthetic construct
  REGION 1..1337: note = MG44-108 effector
MEKFYIGTDIGTNSAGVACTDENYNLLRVKGKDCWTVRLFDEGKTAVDRRTFRTGSRRLQRRKQRIAWLQDLFAPYMEDETFFIRLNNSQFLPEDKDALLGGDKNTLFAGVYDDKKFHTEFPTVYHLREALMRGGVNDLRLYYLALHHIVKYRGHFLTEGSVDDVRDFGRLLGNLNGVISDVYGDEVPLFSEASSSEVKNILLDKTLGIKERSIELEKIFGVKDKTSKEIIKGLCGGKISPAVLFGDEYKEEKSFSFKEITDENFEGMRATYGDDFALLEGIRSVYGYVTFEKLLSDHTDLSSAMMDVYDKHKKDLLALKAFIRSERPEDYNKIFKSTDEKYNYVNYIGYTKKGGDKKKVKKCKDDEFYAYIKKYLQGLTDVKDVAARDKFLKDIEAGSFMQKILHSDNGLFPKQINEYELKKILENMVKSFPATAEIKDKIVTLFNYRIPYYVGPLAGKEETCWAVKKSNEKITPWNFDDVIDKAKSNEKFMLRMTNKCSYLRGEDVLPKASIIYQKFDTLNQLNKLRVNDELLTVDLKQKIFNELFLKYTKVSDKKIIDLLVREGKISQNDRSEVTLSGKDGEFKASMSSYIYLKNILGDFVDKDLSENGGVCENIILWHTLNTDKNIVVDLIKENYGKIPEIKNAIKQLKGLVFHDFGRLSRKLLCEIYTVKEDTGELWNVLDALYETNENLNELLNDEKFSFGRNIKEENGEMTSDVGYKDVEELYVSPAVRRGIWQTLTVVDEYVKAIGKAPDKIFVEVTREDGIKGDAGRTQSRKRRLQEKFRTVSDAYADVIAELGEERFTDLKLRQERLFLYFRQLGRCMYTGERIDLKNINDVTCYDVDHILPRTFIKDDSLDNKVLVLRSKNAKKSDTYPLPAGFSNQRDFWKMLLDKGLIAKVTYDRLTRTEPLREDEYQDFINRQKVITDQTVKVVAELFKRRYPTAKIVYSKAKNVNDFKQKFDLFKCRETNDLHHARDAYLNVVVGNVYDTVFTTPMSMYRKDGDVWRTYNLNKLFTRDVKGAWDNAQSIATVKKVYSKNSMVVTRYATCNNGGFYNATVYSKDEKGITAPRKGKGPLSDSSKYGGYMTQPTAYFAIVSSKDKNGNEIKTIEAVPVLTAYVAKNDPKAVEKYFTGRLKDAKIIVPKIKIKQLASYNGTLCCLAGTTDNRILVHNAVELFTDGKTDEYVNSLLKLADMKAKGIINVGQEEFVMKTNRDGERKLVIDRANNADLYDMLKRKLERENYAGLSAFATFRKNLEKGEEKFNSLTVYEQTVVLLQILKFFKCNAETADTTLVGGSAKSGSIKFNNNITNVDFRLIDLSPAGLTERVRKV

SEQ ID NO: 109 - protein, 1332 aa, synthetic construct
  REGION 1..1332: note = MG44-109 effector
MKKFYVGTDIGTNSVGVACTDENYKLLRAKGKDCWTVRLFEEAKTAAERRTFRTARRRLARRRQRIVWLQDLFAPYIEDKTFFIRLNNSQFLSEDKDELLGGNKNNLFAGEYDDRKYHEEFPTVFHLREALITGGKYDLRLYYLALHHIIKYRGHFLFEGSVEEIRNFSRLLKGLNGVLSDLYGDEISAFSETASDEVKAILLDKTKGIKDKQLLLEKLFAVSDKTSKEIIKGIIGAKISPAVLFGEEYKELKNFSFKEMSDDTFEQMHMDYGNNFALLEAMRSIYSYVTFEKLLEGHRDISSAMIAVYDKHNSDLNKLKNFIRTEAKEYYNQIFRNVNEKSNYVNYIGHTIKDGVKKKVKRCKDEEFFAYLKKILSSLNNVNDEACRNAILAELENGTFLPKILHSDNGLFPRQINEAELNRIVTNMVKNYPETAAFADKILPLFRFRIPYYVGPLTGTNSWAVRTAEKVTPWNIEQVVDFAKSNEEFMRRMTNKCTYLRGEDVLPKASVLYQKFDVLNQINKLRVNDMLLPIALKQKIYNELFLVYPRVSDKKIKELLVRENYISAEDAKAIVLKGKDGEFKASMSTYIRLKKILGDFVDKDIESGGGVCENIVLWHTLNTDKKIVENLIRKNYGNIPEIKAAISQLKGLTFNDFGKLSAKFLNGITAINKTTGEIVTILDVLFDTNENLNEILNDENYNFAEVIESENGLADSKVDYSSVEELYVSPAVRRGIWQTLGIIDEYVAAIGKTPDKIFVEVTREDGQKGDEGRTQPRKRQLLEKYKNVGEAYADVIAQLGDEKYSDLKLRQERLFLYFRQLGRCMYSGERIDLENLNTDTYDVDHILPRTYIKDDSLDNKVLVLRSKNAKKSDTYPLPEEFFNQRGFWKMLLEKNLISRTTYDRLTRTEPLGDNDYKDFINRQKVITDQTAKAVIELLGRKYPNTKIVFSKAKNVNDFKNKFNLFKCRETNDLHHARDAYLNVVVGNVYDTVFSTPIAMFRHDGDAWRTYNLKKLFTRDVAGAWSDDIRKTVLDTFAKHSMMVTRYATCNKGMFYDQTVYEKGDSCITAPRRGAGPLADYSKYGGYSSQKTAYFAIVSSIGKKGERIKTIEAIPVLVDYRLKTDPDAIIKYLKTKLNQPEIIVSKLKIKQLVSYNGTLCSIAGITGTQISVHNANQLFTDNKTDEYVCALLKLLDMNSKNMVAHDETEYVIKTNRNGERKLVITKESNIKLYDVLRNKLDSDIYSGISAFKTFKGNLDNSSVIFAELNIIDQAKVIIQVLKALKNNAETADIRLIGGGPQSCRIQINKNITDVDFKIIDLSPAGLTRRIRKV

SEQ ID NO: 110 - protein, 1425 aa, synthetic construct
  REGION 1..1425: note = MG44-110 effector
MSNYDNFKKYGDYYIGLDVGTGSCGWAVTDKSYNILKVSGKSLWGVRLFPTADTAAERRAHRCARRRVFRTRQRLNLLEQLFDPEISKVDVGFFQRLKNSEFKEIPKNNLFGDNSYKDKDFFKEYPTIYHLRYKLMNEPVDDIRLLFLAVHHIIKHRGHFLFERLDVNNIGASLPELWEQCCSQFVDISLFSNVSDDFQEIADSLKQNLIDMRDDVINVIRTSSDKRSDLKKVFAQLKSVYDEISDPEVKKSTENKVNRWYLLLLGYKVSAAEIFTIEESDEEGLSCKIKFNSSDYDEQIQKINDEFKGVVESEKAVYDVIKLQEILKDCNSISESKVELFNKHAEELRIFKSLLRERLSENLLAEVNKKVNVAKNEKLTTEPKSFYKEIFEERNKNTEKGKICFYYDITHGDKSANKEAIKGSSIYKRLQILAQILLCSSEINKLSEKEKVLLHRIGDLSIFETQVSADNSVIPYQINLAELDKILKVQSKNFAFLSEKDDAGVSVYDKIKALLTFRIPYYVGPLNNHSKFSWIVKKSQEKIVPWNFESVVDTEKSAEAFIKRMTSKCTYLSGEDVLPKNSIIYSKFMVLNVLNNIRINGMRLDEAQTGLTKKVFDELYCNQINVTQKQLVAYLYNNGFLTSKEELTGFDDEPKVSMSSYVKIKNALGTDNFDINFAESFIKYSTLFPNDYLMIEKRLKREFSSECAKFNENLSKLCRIKFSGWGRLSEKLLTGLLGHNKNSEFDKNSILGFMLNGKGNLMELLSSEYTFSDLISSENSTLDKNDAFSYQNLVEGLYVSPSVKRMIWQTLLVVREITKKIMGYEPSRIFVEMARGATADQKGKRTNSRKKSILALYDKCRKDFDISEIYSSLEKQDDNKLLSDKIYLYYTQLGKSMYTGNKIEFEDLLNNSKQYDIDHIIPQSLTKDDSIDNRVLVERTVNEVKDNNYPLSYQIRENQTQFWKHLLDLGLISKSKFERLIRSTSLSNSEKEGFIARQLVETRQSTKAIAGLLSKLYKKAKIIYPKAGLTADFKQKFDLIKVRELNDLHHAKDAYCNIVVGNVYFEKFTSKYQYVIANNERYSFSTSDSSYIFTNQNEKRLQQSGTWDSRNGKSISIVKKYYKRNNILMTYKQEERIGALFNQTLYGPEKGTIPKKKNMSCHDYGGYDSDQNSFFSFISYKDDKGNLKTKLIGIPLRVVYGLSDKSSAISHYLLTEKSNEYIDPKVLIDFLPYNFILKDNETGFLARVVSYATKGRQLVLKQFNSLILNEKNNKMLKAIDNFVSRLKNKSFEVKYDKDKSGFTEEDLSSIYSELKDKTKNTVLKALPKTTVKILTDVDINSYQYSENEKSEPKLLSIEQKAVAICEVIKAFHTEPSDLSLLGGKANSGKMCINSVLNLDKDDYSVVFYSITGFYEKELRLSDLLK

SEQ ID NO: 111 - protein, 1420 aa, synthetic construct
  REGION 1..1420: note = MG44-111 effector
MSNYNNFKKYGDYYIGLDVGTGSCGWAVTDTSYNILKVSGKSLWGVRLFPTADTAAERRSHRCARRRVFRNRQRLNLLEQLFDSEISKVDVGFFQRLKNSEFKEISKNNLFGDCTYNDKDFFKEYPTIYHLRYKLMNEPIDDIRLLFLAVHHIIKHRGHFLFDNVNNIGASLPELWEQCCSQFVDISLFSNLSEDYLDIAESLKQNLIDMRDDVINVIKTSSDKKADLNKVFAQLKSVYDEISDYEVKKTIENRVNKWSLLLLGYKVSAVEIFSIDESDEEGSSCKIQINSSDYDEQLLKIKDEFKGVVESEKAVYDVIKLQEILKGCKSISEAKVKLYNKHAEELRIFKNLLRERLSEKILIEVNKNVKVANNEKLTSDPKSFYKEIFEERNKNTEKGKICFYYDITHGDKSANKEAIKGSSIYKRLQILAQILLCSSKIYKLSEKEKVLLHRIGDLSIFETQVSADNSVIPYQINLAELDKILKVQSKNFAFLSEKDDAGVLVYDKIKALLTFRIPYYVGPLNNHSKFSWIVKKSQEKIVPWNFESVVDTEKSAEAFIKRMTSKCTYLSGEDVLPKNSIIYSKFMVLNVLNNIRINGMRLDEAQTGLTKKVFDELYCNQINVTQKQLVAYLYNNGFLTSKEELTGFDDEQKVSMSSYVKIKNALGTDNFDINFAESFIKYSTLFPNDYLMIEKRLKREFSSECAKFNENLSKLCRIKFSGWGRLSEKLLTGLLGHNKNSEFDKNSILVFMLNGKGNLMELLSSEYTFSDLISSENSTLDKNDAFSYQNLVEGLYVSPSVKRMIWQTLLVVREITKKIMGYEPSRIFVEMARGATADQKGKRTNSRKKSILALYDKCRQDFDISDLYSKLENEKDSKLLSDKIYLYYTQLGKSVYTGKEIKIDEFDLYDIDHIIPQSLTKDDSLDNRVLVEKEINQNDKKNRYPLSSEIQENQKQFWKHLLDLGLISKSKFERLIRSTPLSNSEKEGFIARQLVETRQSTKAIAGLLSKLYKTAKIIYPKAGLTADFKQRFDLIKVRELNDLHHAKDAYCNIVVGNVYYEKFTSNYLYVIENNEPYSFSTSDKSYIFTKQNEKRLQETGTWDSRNGKSISIVKKYYKRNNILMTYKQEERIGALFNQTLYGPEKGTIPKKKNMSCQDYGGYDSDQNSFFSFISYKDDKANLKTKLIGIPLRVVYGLSDKASAISHYLLTEKANEYREPKVLIDFLPFNFILKDNETGFLARVVSFASKGKQLEIKQFNPLVLDEKNLKPLKAIEKFVSRLKNKSIKIKYEKDKSGFTDEDLSSIYSELKDKSKNSVFKNLPKPIVKMLSDVDINNYKYQESEKSEPKLLTIEQKAVAICELIKAFHTESSNLLFLGEKKGSGVKRIKTVLDLEKTDYSILCSSITGFYEKEIRLRDLLK

SEQ ID NO: 112 - protein, 1416 aa, synthetic construct
  REGION 1..1416: note = MG44-112 effector
MEEIYLGLDIGTNSCGYAVTDGNYNLVRIGGKDAWGVRLFEKAETAQERRAKRTARRRVVRKKLQNLWLQQLFEKEIEKIDPSFFTRLKYSNLHLEDKILSDKNLTSKYSLFNDTVKQVFTDKEYYEKYKTVYHLREELLKKPAEDVRLLYLAIHSILTHRGHFLSETDFSSNVPIEDSFNNLLDKLSAYSVEFNDGKNVLTIKPDKISGIFLLLEDFSQGLSYRQVKENFEKNLDVKTKLDKTVASILLSGKFKTTDVFAVEKEDAVKVDFNDEKFEEVYGTLSSQLSETELAILNLFKDLYSSIQLKKLLGKNDYICEAMVERYDKHNEQLKELKTFVKTYFPSKKNLVFNAQKTSKKKKEEKSGKIANYAAYCYSDLKDGKKQIIDGVASREDFYKFIKNELLECSPEVETDLIKFEEQKQKILNSIEKNDYLLKIRSHDNIVLPNSLYKVELQQILKINEKKFKFLSEKDEKGKTISEKIIDIICFRIPYFVGPIGQSERGWIRKDKNLDFKPWTLNEIINFDEAEDKFIQNMTSKCTYLPTEDVLPKDSLLYSKFRVLNELNNLKVNGNDITVETKQRIFKGLFEKYKKISKNKLIEFLKQENIYPKNESIVITGIDNEFANNYSSYVTLANKFGEEFVNKNYDVFEKIIKYHTIISDKLRLEKRIKREFKIFSNEDVKFLKSLNYSGWGKLSGKFLNGIKFADKKSNSPEFESKTIISAMWETNKNLQEVIFCKDYNLLEKLEANIEKIQRDLVYEDVQNMYTSPSVKRGTWQAISIINELKSKLGKYPDKIFIEVTRNDQEKGDKGRKDSRFGAVVKKYKDKVLKEDCLKEAINYNNLLDELNKRNNSHLRSEKLFLYFMQLGKDAYTGEPIDISELGNDNAYNVDHIIPRSKVKDDSLDNKVLVSAAANLAKGDEYPLKRKIQFAQKDFWRMLNKNGLMSDKKLARLERTEEFTDKDADDFTNQQLVSTNQESKAVIDLLSKVYDNRRNIVFSKAMFVTEFRNRYNIFKSRDVNDLHHAKDAFLNVVVGNVLFNRFTQGYWKKDKNIKILEDKNRVDADEDKNEKVTSVVDKVFGRYVWSNQTGEVVWKGWKDVERIQKICYQNSPVISIMPYVNRNGAFYDETIYKKKNDGEKFKAAFALKEKGPMSSIEKYGGFNSVNNAYFMVVESVDNKGRIKKTIECVPIIVEYKYRNDPDKKQKIIKFIEETNNIKITRVIKDELKFRSVLKINGGLYMLTAKTSDSFKVLKLNQWYISNSDTGYIKILEKYKNMPQVAKECLKEDGERLIVSPAVKENSRPQIITRTQNVELYDLIINQLSKKIYDLSSIKAIVSNLKDKRDLFIALSIPNQTEVLLNLVKYVGGGYLADLKLLGGTEHMGTTRISKDITDLNIYLIEQSVTGLYSKGTKL

SEQ ID NO: 113 - protein, 1336 aa, synthetic construct
  REGION 1..1336: note = MG44-113 effector
MNKKDFYVGLDIGTNSVGIACTDQDYNLRRSNGKDCWAVRLFDTANTAAERRVFRTARRRLQRRKYRLGQLQALFAPYIADDKFFIRLNNSQFFVDDKDECLSADKNTLFADSGYTDKEFHEAFPTIYHLRLALQNGHASDIRLYYLALHHIVKYRGHFLFEGSVGDIRDIKKLFVDLNTACEAVYADEVPYFDTQLCEQAKNTLMKPSGIRDKQKALEALFDGTSKAQSEIIKAMCGGKLAPKTMFEGRYEEEKSFSLSEMQDEAFDALAEVFGDDFVLLQALRNLCNFVKFEKLFAGQPNISSAMIAVYDKHAADLAMLKIFLKTYAPQMYNKVFRSVTESANYVNYIGYNKKKSAKTKVAPCKYEDFLAFVKKIVAAVDCADTELRDKILAEIDNKTFLPKILHADNGLIPHQVNEDELVKIVKSMTEAFPETQAMAKQILPLFRFRIPYYVGPLVGENSWAVRKSDERITPWNFNEVIDLAASNEQFMRRMTNKCTYLHGEDVLPKCSIVYQKFNTLNQINKLQVDGRAISVELKKKIFDQLFLAKSKVSDKMIVDLLVREGVVSPQERTQAVLSGKDGDVKASMSSYIQLKRILGDFVDEDISSGGNVCENIILWHTLNTDKSIVEDLLRRNYGDNPHITPYIKQLKGLMFADFGRLSDKLLTGLRTVDKSTGELRSILDLLYDTNQNFNEIIFDERYDFAELIRKENSGESTEITYEEDIATMRVSPALKRGIWQSLQLVDEYVAALGGTPDKIFVEVTREDGVKGNDGRTVSRKKQLLEKYKGVENIDELVAELQSDDVSDMRLRQEKLYLYFRQLGRCMYTGKRIDLSQLNTDLYDVDHILPRTYIKDDSLDNKVLVLRSKNAEKSDSYPLPQGFSNQAPFWKLLLDKGLIGEKTYKRLTRTAPLTDDDYNDFINRQKTITDQTAKAVVELLKRKYPQAKVVFSKAKNVSDFKQKFDLHKCRETNDLHHARDAYLNIVVGNVYDACFTTPMAQFRKDGDVWRTYNLKTMFTRNVKGAWDENSLATVKKTYSKCSMSVTEYTYCGKGAFYNQTVYGAGDTSVTAPRKANGPLANTARYGGYKSQNTAYFAIVDSLGKKGVTQRTIEAIPVMVAYRATTDTNAVFDYLTNTLQLRDVKVVVPKVKKNQLVSYNGSLVRLTGVTGVYITTNNDRQLFTDNKTDEYVNQLLKLLEMDKNGRVDKTASEYVMKTNRMGDVKLVVDKAHNENLYNCFVEKLQGGKYGKLSSFVTFGKNLQSGKEKFANLTTLEQAYVIVQILRFFKCDAQTADIRLIGGSGLSGKVLFNKDITTVDFQLIDQSPCGLTVRTRKL

SEQ ID NO: 114 - protein, 1420 aa, synthetic construct
  REGION 1..1420: note = MG44-114 effector
MSNYNNFKKYGDYYIGLDVGTGSCGWAVTDTSYNILKVSGKSLWGVRLFPTADTAAERRSHRCARRRVFRNRQRLNLLEQLFDSEISKVDVGFFQRLKNSEFKEISKNNLFGDCTYNDKDFFKEYPTIYHLRYKLMNEPIDDIRLLFLAVHHIIKQRGHFLFENVNNIGASLPELWEQCCSQFVDISLFSNLSEDYLDIAESLKQNLIDMRDDVINVIKTSSDKKADLNKVFAQLKSVYDEISDYEVKKTIENRVNKWFLLLLGYKVSAVEIFSIDESDEEGSSCKIQINSSDYDEQLLKIKDEFKGVVESEKAVYDVIKLQEILKGCKSISEAKVKLYNKHAEELRIFKNLLRERLSEKILIEVNKNVKVANNEKLTSDPKSFYKEIFEERNKNTEKGKICFYYDITHGDKSANKEAIKGSSIYKRLQILAQILLCSSEIYKLSEKEKVLLHRIGDLSIFETQVSADNSVIPYQINLAELDKILKVQSKNFAFLSEKDDAGVLVYDKIKALLTFRIPYYVGPLNNHSKFSWIVKKSQEKIVPWNFESVVDTEKSAEAFIKRMTSKCTYLSGEDVLPKNSIIYSKFMVLNVLNNIRINGMRLDEAQTGLTKKVFDELYCNQINVTQKQLVAYLYNNGFLTSKEELTGFDDEQKVSMSSYVKIKNALGTGNFDINFAESFIKYSTLFPNDYLMIEKRLKREFSSECAKFNENLSKLCRIKFSGWGRLSEKLLTGLLGHNKNSEFDKNSILGFMLNGKGNLMELLSSEYTFSDLISSENSTLDKNDAFSYQNLVEGLYVSPSVKRMIWQTLLVVREITKKIMGYEPSRIFVEMARGDTADQKGKRTNSRKKSILALYDKCRQDFDISDLSSKLENEKDSKLLSDKIYLYYTQLGKSVYTGKEIKIDEFDLYDIDHIIPQSLTKDDSLDNRVLVEKEINQNDKKNRYPLSSEIQENQKQFWKHLLDLGLISKSKFERLIRSTPLSNSEKEGFIARQLVETRQSTKAIAGLLSKLYKTAKIIYPKAGLTADFKQRFDLIKVRELNDLHHAKDAYCNIVVGNVYYEKFTSNYLYVIENNEPYSFSTSDKSYIFTKQNEKRLQETGTWDSRNGKSISIVKKYYKRNNILMTYKQEERIGALFNQTLYGPEKGTIPKKKNMSCQDYGGYDSDQNSFFSFISYKDDKANLKTKLIGIPLRVVYGLSDKASAISHYLLTEKANEYREPKVLIDFLPFNFILKDNETGFLARVVSFASKGKQLEIKQFNPLVLDEKNLKPLKAIEKFVSRLKNKSIKIKYEKDKSGFTDEDLSSIYSELKDKSKNSVFKNLPKPIVKMLSDVDINNYKYQESEKSEPKLLTIEQKAVAICELIKTFHTESSNLLFLGEKKGSGVKRIKTVLDLEKTDYSILCSSITGFYEKEIRLRDLLK

SEQ ID NO: 115 - protein, 1347 aa, synthetic construct
  REGION 1..1347: note = MG44-115 effector
MEKEQKFYLGLDIGTNSVGIACTDENYNLLRVKGKDCWAVRLFDEAQTAADRRTARTARRRLQRRRYRINQLQGLFAPFMQDNLFFLRLNNSQFFADDKAGELDGDVNNLFADSGFTDRNFHEKYPTIYHLRFALQQSPVDDIRLYYLALHHIIKYRGHFLYDGNVSEVRDVHKLFDALNTVCENTFAENTPHFDIEKADEAKDMLLRSKGKLKDTVKSIKQLFSVQNDDCGKIRTEIIHGFCGAKFSPEKLLGDAYSEEKSFAFRDVEEDAFEAMQSTYGDDFALLKAMREIYNFVTFERLFNGQPNISSAMIAVYDKHKSDLKKLKGFIKKNYDTDGGKKCREMFSDVTQKANYVNYVGHVGYGKSRKRVKTCDYDSFIAYVKKFLMDGNFAHDETYDEIMAEIEAKTFLSKILHSDNGLVPHQVNEDELVKIVAQMVRAFPETAQMASKILPLFLFRIPYYVGPLVGSNSWAVRKSDEKITPWNFRDVVDEAASNEEFMRRMTNKCTYLHGVDVLPKCSIAYQKFNTLNQINKLKVNDCAISVPLKQKIFAELFLVKPRVSDKMIASLIVREGAVAPGDSVVLSGKDGGDIKASMSSYIQLKRILGDFVDYDLASGGNVCENIILWHTLNTDKRLVEDLIVKNYGDNPAVAPYVKQLKGLVFNDFGKLSGRLLTELEVVDKQTGELCTVTDLLWNTNENFNELMFDKRYNLEEVIAAENNDDDGKVDYEDVQKLYVSPAVRRGIWQSLQMVDEYVAALGKEPDKVFVEVSREEGVKGDKGRTHSRKKQLLEKYKNINPKDVENIDELTGELNSDKISDMRLRQERLYLYFRQLGRCMYSGEPIDLDHINDSKLYDVDHILPRSYIKDDSLDNKVLVLRSKNAEKSDTYPLPLGFTNQQGWWKMLRAKDLISSGTYDRLMRTAPLTDDDYNDFINRQKVITDQTSKAVIELLKRKYPGATLVYSKAVNVADFKSKFDLYKCRETNDLHHARDAYLNVVVGNVYSTVFGVRIETYVKDGEKWKTYNLKKMFTRDVPGAWNENSIRTVKGVYNSSSMCVTRYAYCNKGAFYKQTVYSGNENITAPRKGKGPLANMERYGGYMTQSTAYFAIVESQGKKGRIKTIEAVPVMVDYQSRNDPDRVVKYFEENGLVDVKLIVPKIKIKQLVSYNGSWVYLAGVGDVRILVHNATELFVDNKIDDYVNQLLKLVEMAKQPTFNKNSDCYIVKTNRMGDIKLVVDKESNVKLYDELILKLECKRFQGFGAYTSFRNVLTESREKFVGLSTLEQAIVLLEVLKFFKNNADTADLSLIGESKCAGKLRFSKNITDVDFRIISQSPCGLTVHVKRV

SEQ ID NO: 116 - protein, 1347 aa, synthetic construct
  REGION 1..1347: note = MG44-116 effector
MEKEQKFYLGLDIGTNSVGIACTDENYNLLRVKGKDCWAVRLFDEAQTAADRRTARTARRRLQRRRYRINQLQGLFAPFMQDNLFFLRLNNSQFFADDKAGELDGDVNNLFADSGFTDRNFHEKYPTIYHLRFALQQSPVDDIRLYYLALHHIIKYRGHFLYDGNVSEVRDVHKLFDALNTVCENTFAENTPHFDTEKADEAKDMLLRSKGKLKDTVKNIKQLFSVQNDECGKIRTEIINGFCGAKFSPEKLLGDAYSEEKSFAFRDVEEDAFEAMQSTYGDDFALLKAMREIYNFVTFERLFNGQPNISSAMIAVYDKHKSDLKKLKGFIKKNYDTDGGKKCREMFSDVTQKANYVNYVGHVGYGKSRKRVKTCDYDSFIAYVKKFLMDGNFAHDETYDEIMAEIEAKTFLPKILHSDNGLVPHQVNEDELVKIVAQMVRAFPETAQMASKILPLFLFRIPYYVGPLVGSNSWAVRKSDEKITPWNFRDVVDEAASNEEFMRRMTNKCTYLHGVDVLPKCSIAYQKFNTLNQINKLKVNDCAISVPLKQKIFAELFLVKPRVSDKMIASLIVREGAVAPGDSVVLSGKDGGDIKASMSSYIQLKRILGDFVDYDLASGGNVCENIILWHTLNTDKRLVEDLIVKNYGDNPAVAPYVKQLKGLVFNDFGKLSGRLLTELDVVDKQTGELCTVTDLLWNTNENFNELMFDKRYNLEEVIAAENEDDNDKVDYREVQKLYVSPAVRRGIWQSLQMVDEYVAALGKEPDKVFVEVSREEGVKGDKGRTHSRKKQLLEKYKNINPKDVENIDELTGELNSDKISDMRLRQERLYLYFRQLGRCMYSGEPIDLDHINDSKLYDVDHILPRSYIKDDSLDNKVLVLRSKNAEKSDTYPLPLGFTNQQGWWKMLRAKDLISSGTYDRLMRTAPLTDDDYNDFINRQKVITDQTSKAVIELLKRKYPGATLVYSKAVNVADFKSKFDLYKCRETNDLHHARDAYLNVVVGNVYSTVFGVRIETYVKDGEKWKTYNLKKMFTRDVPGAWNENSIRTVKGVYNSSSMCVTRYAYCNKGAFYKQTVYSGNENITAPRKGKGPLANMERYGGYMTQSTAYFAIVESQGKKGRIKTIEAVPVMVDYQSRNDPDRVVKYFEENGLVDVKLIVPKIKIKQLVSYNGSWVYLAGVGDVRILVHNATELFVDNKIDDYVNQLLKLVEMAKQPTFNKNSDCYIVKTNRMGDIKLVVDKESNVKLYDELILKLECKRFQGFGAYTSFRNVLTESREKFVGLSTLEQAIVLLEVLKFFKNNADTADLSLIGESKCAGKLRFSKNITDVDFRIISQSPCGLTVHVKRV

SEQ ID NO: 117 - protein, 1366 aa, synthetic construct
  REGION 1..1366: note = MG44-117 effector
MKKFYIGTDIGTNSVGIACTDENYNLLRAKGKDCWAVRLFEEGETAAKRRGFRTARRRLARRKQRIAWLQELFAPFIEDKTFFIRLNNSQYLPEDEDELLFSDKNNLFAGKYDDKKFHKDNPTIYHLRKKLVDGGDYDLRLYYLALHHIIKYRGHFLFEGGMDDIRDFKRLLSELNAVIEDLNLTDESEKDDTVNKVEGFDLTKADDAKKILLSRDTGIKDKQLKLFELFSESGKIQKEIIKGITGGKISPATLFGEELKEEKGFSFKEITDEEFEAMKLTYGDNFALLEKMRSVYGFVTFERLLEGHPDISSAMIAVYDKHKADLKKLKDFIKDEFPQENCDAESNKDFKKIYNNIFKDTDQKANYVNYIGYTKKGGKKINVKKCKDKDFFDYLKKKLSDIPNVKDENTRDEIKNELESGTFLPKILHSDNGLFPRQINEAELEKIVANMVKNHPETKAFADKIVKLFEFRIPYYVGPLTGDKSGDGSKNKSWVVRTDEKITPWNFDDVVDKARSNEEFMRRMTNKCTYLRGEDVLPKASIMYQKYDTLNQLNKLKINDVPIPVELKKKIFDELFLTYPKVTDKKIKEFLVKEGLFSPGDEKNIVLTGKDGDFKASMSSYIRLKKILGDFVDKDIKSSGGVCENIILWHTLNTDKNIVKGLIDKNYSHIPEIKAAIPQLKGLTFNDFGRFSAKFLSGIEGVNKETGECMTILKALYETNENLNELLFDDNFDFGTRIEKANGGNDTEITYEDVEELYVSPAVRRGIWQTLLMIDEYVAAVGRVPDKIFVEVTREDGKKGDEGRTKSRKNQLEEKYKNIDAAYADIKAALEDEKYTDLRLRQERLYLYFRQLGRCMYTGARIDLENLNTDTYDVDHILPRTYIKDDSLDNKVLVLRTKNAQKSDTYPLPAGFVGKAQYDFWKMLLSKELISRTTYDRLTRTKPLSDDDYKDFISRQKVITDQTAKAVIGLLKQKYPDTEVVFSKAKNVSDFKNKFDLFKCRETNDLHHARDAYLNVVVGNVYNTVFSTPMEMFYKDGDKWRTYNLKKMFAIGVEGAWNTEKSIKIVKDTFARHSMMVTRYASCEKGGFYNQTVCGKNDKSVTAPRKGKGPLADTSKYGGYNTQTTAYFSIVSSTDENDKKIKTIEAIPVLTSYMAKSDPEAVQKYLATYLKDPDFLLSKVKKYQLVSYNNTLCYIAAITGNYIIAYNANQLFTDNKTDEYVRELVKILKLNDKNMIKKDESEYPTKVNSKEGKKLSVTAEMNIKFYRYLKDKMNDKIFAGISTFKKFSKALAKGEEAFISLSTLDQSKVLLQILKFLKCNGDTADTRLIGGSGRSGTICLNKDITDVDFKLIDFSPAGLTERIRRV

SEQ ID NO: 118 - protein, 1417 aa, synthetic construct
  REGION 1..1417: note = MG44-118 effector
MNKEIYLGLDIGTNSCGYAVTDSNYNLVRIAGHDAWGVRLFEEAQTAKERRINRATRRRIVRKKLQNNWLQELFKSEVEKVDPSFFTRLKFSNLDKEDKEKSDKNLTSKYSLFNDMVEEIFTDKQYYDKYKTVYHLRKSLLTNPAEDIRLLYLAVHSILTHRGHFLYETDFSNNQSNDTLKADFVSLLEKLKTYGEENFDAKNNLTLTGDKANCVMSLIKDFDDGLPYKQIKENFETELGVKTKLDKTLASILISGKFKTSDIFDVDKEDAIKIDFNDANFEEQYGEIISSLKDVEVEILTLLQAIYANIQLKKLLGENNYICQAMVERYEKHNKQLQELKKFVKTYFPSKKKIIFNAGHKPSKNGKNEKKENTQYNNYAAYCYSDICSGKKRVLYKKASQEDFYKFLKSELFECDVENNVELDKYEERKQNILNAIEKNDFLLKLRSNDNILLPNSLYQAELKQILKVSAQKFNFLNNKDANGHSVGQKIIDVVSFRVPYFVGPIGESENGWIRKDKSADFKPWTLDKIIDLDEAENRFIQNMTNKCTYLPTEDVLPQKSLLYSKFRVLNELNNLKINGNAITVEIKQQIFDGLFKKMPKVSTKKLVEFLKQYNIINKNDSNVVFTGIDKEFANDYSSYVTFATKFGEEFVNKNLEVFEKIIKYHTIISDKSRLAKRIKREFNIFSDEDIKFLKSLNFSGWGSLSQKFLEGLKFSDKKSANPEMETLTVMSVLWETNKNLQEIIFCKTYDLQQKLDANIQKIQRDLLYDDIQNMYTSPAVKRGTWQAISIINELKNKLGKYPDKIFVEVTRNNQEKGEAGRKDSRHKMVVKKYKDKQLKLDCQKLCIEFNKLMEELNQKDNSNLRSEKLYLYFMQLGKDIYTGKPIDISQLNNDNMYNVDHIIPRCKVKDDSIDNKVLVSAAANLAKSDNYPIDGHIQASQKAFWELLRENGLMTDSKLARLQRTEEFTEKDADNFTNQQLVSTNQESKAVIDLLSKVYSNKRNIIFSKAMFVSDFRKNFNINKSRDVNALHHAQDAYLNVVVGNVLFNRFTEGYWKKNTQENNNQTADKNANTTSVVEKLFRRTVWSNQTGEVVWKGQPSIDLVRKNCEKNSPCISIMPYENKNGMFYNATVYKSSKNHSATPASFALKAKGPLSSIDKYGGYNSLKNAYFIAVESVDANGTVNKTIETVPIIVEYQYRNDANKTQKIIEYIEKTNNIKITKVIKDKIKYRSLLKIDGGLYMLTAKTNDSLKLLKLNQWFLSNKDIGYIKILEKYQNMPATIKELLKTTDEEIIVSPAVKTNSKQLAISRTNNVYLYDLIIAQLGKKIYSLSSISGLVKKLTNARSVFLSLSISAQAELLLGLVKYVGGAYNVDLALLGESQYAGSTTIGKNISNLNISLIEQSVTGLYAKETVL

SEQ ID NO: 119 - protein, 1334 aa, synthetic construct
  REGION 1..1334: note = MG44-119 effector
MKKFYIGADIGTNSVGVACTDESYRLIRAKSKDCWAVRLFDEGETAFDRRTKRTARRRLARRKQRINWLQELFEPFIDDKTFFIRLNNSQYLPEDKDSLLCGNKNNLFENEGEESKFYKKYPTIYHLRKALMDGGNFDIRLYYLALHHIIKYRGHFLYEGSIEDIRDFSNLMKGLDCAIADSYDGGLNLFDSVDSAKVRDILIDKKSGLRDKQVELEKLLCVKSKREKEILKGITGQKISPYVLFGDEFKEEKSFSLNDMSDEEFESKRSSYGESFTLLDLMHSVCNYVKFEKIFEGHSDISSAMISVYEKHKADLVLLKKVVRKQSKEDYNKIFRSVNEEKNYVNYIGYTSKDGRKIKVKKCKDEDFFKYLKKYLNGILNEDNFDIVSKIIKEIDDRIFLPKILHSDNGLFPKQVNEFELKKIIENMVRNYAETEEMASAVLSLFNYKIPYYVGPLTGCNSWVVRTDEKVTPWNFDRVVDLAKSNEAFMRRMTNKCAYIKGEDVLPKASIIYQKYDTLNQLNKLRINDRVISIELKQTIYNELFLKYPKVTDKKIKELLVREGLCSSSETKDITISGKDGDFKSSMSSYIRLKNILGDFVDDDLKSGGKVCENIILWHTLNTDKKIVEDLIEKNYGFIPEIKANIKQLKGLTFNDFGRLSAKLLIGIEGVDKTTGQILTILDVLYQTNQNLNEVLNNESYNFSEIIDEENGIETEIISYETVEELYVSPAVRRGIWQTLLMIDEYVNAVGRQPDKIFIEVTRNDGKKGDNGRTQPRKRQLQEKFKNIGSAYSDIIEELSEEKYTDLKLRQERLYLYFRQLGRCMYTGERIILDELNGNRYDVDHILPRTYVKDDSLDNKVLVCRGANATKADTYPLPTEFSRKEVRAHWKMLLDKDLISKTTYDRLTRIEPLKDDDYNDFINRQKTITDQTAKAVIELLKRKYPNAKLIFSRAKNVNDFKNRFNLFKCRETNDLHHARDAYLNVVVGNVFDSVFSTPLGQSRKDGDVWRIYNLKKLFTRDVIGVWSKDSIKIVKDTYSKPSMSVSRYATCNKGKFYDETVCRKNDSAITAPRKGKGPLSDVTKYGGYTTQKTAYFAIVTSVDKKGKSIKTIEAIPVLVTYKLKTDTNAIQKYLESYLREPNIVVPKVKVKQLVSYNGSLCYLAGITNNQITVHNASQLYTDNTTDEYVNELIKIIGMGDNGIITGNESQYITKTNKDGVIRIVVNKENNEKLYETLKNKLDSKIYKGLSAFASFKKNMERGKDKFCELSVLEQAKVLLQILKVFRCNAEISDIQAIGGTAHSGKKLFAKNITDVDFKLVNLSPAGLTVRIRKV

SEQ ID NO: 120 - protein, 844 aa, synthetic construct
  REGION 1..844: note = MG44-120 effector
MEKFYLGTDIGTNSVGIACTDENYELIRAKGKDCWAVRLFDESKTAETRRNFRTSRRRLERRKQRISWLQALFATYINDETFFIRLNNSQFLPEDKDEILQADKNALFGDDGYTDKDYHAEFPTIYHLREKLIEGGKYDLKFYYLAIHHIVKYRGHFLFEGATMEEIRDIKRLFENLNAVWEATYAENVPHINLAMSDEAKEILLDTKKGLRDKQIALEKLFGENTALMKESIKAMLGGKISPETLFGEEYKEEKSFSFKDMDEEAFDALQSTYGDNFECLNTLRSIYNFVAFEKLLCGHKNISSAMIAVYNKHAADLSLLKSFIRSERPNDYNKIFKSTNEKANYVNYIGYTKKGGEKKKVAKCKSDDEFFAYMKKYLSSLDDIKDGATRDKILGEIENGSFLPKILHSDKGLFPRQVNEAELKAIASNMVKYYPETKEIADKIIPLFEYRIPYFVGPLAGVNSWAVRKSGEITPWNIGEKIDLAASNEEFMRKMTSKCSYIFGEDVLPKCSIIYQKFDVLNQLNKLRVNDRPLTVDLKKGIFNELFLKYPKVSDKKIKDYLIRNGHFSPTDGEITLSGKDGEFKASMSSYIQLKRILGDFVDKDLENGGEVCENIILWHTLNTDKKIVYDLIEKRYKNIPEIADSVKALKGLSFKNFGRLSKKFLVDLYSADNETGELVNILDVLYETNENLNEILNDEKYAFGKLVDEANGVADSKITYEDIEKLYVSPAVRRGIWQTVTMIDEYVEAIGRTPDKIFVEVTREDGVKGDAGRTQPRKRQLQEKYKNISETYADVISELGDEKYSDMKLRQERLFLYFRQLGRCMYSGQRIDLDRLDNLVIV

SEQ ID NO: 121 - protein, 1336 aa, synthetic construct
  REGION 1..1336: note = MG44-121 effector
MEKFYIGADIGTNSVGIACTDENYNLLRIKGKDCWTVRLFDECKTAEERRGFRTSRRRTARRKQRINFLQSLFAPYMNDKTFFIRLNNSQFLPEDKSELLHGDKNTLFSGDYDDKKFHAEFPTIYHLRDKLMSGGIYDLRLYYLALHHIIKYRGHFLFEGSMEDVRDLGKLLNALNDAMVGVYGDELSLFDKSVAEEAKSVLLDDKLKIRDKQIGLEKVFRVDDKIRKEIIKGLCGGRISPSILFGDEYKDEKNFSFKEISDEIFESMRDTYGDDFGLLCAIRSVYGFVTFEKLLEGHSSLSAAMIAVYEKHKNDLKRLKSFIKSERPEDYNKIFKSTEEKCNYVNYVGYTKKGGDKKKVKKCKDDEFYAYLKKYLSGLDDVKDAETRNAIIEEIEDGKFLPKILHSDNGLFPRQINESELNKIVGNMVKAYPETAAVEEKILTLFRFRIPYYVGPLSGENSWAVRKSDDKITPWNFYDVIDAAKSNEEFMRRMTNKCAYLQGEDVLPKASVLYQKFDTLNQLNKLRVNDEIISVELKKKIYNELFLVYPKVSDKKIKELLVREGRISPSDVNDTVLSGKDGEFKASMSSYIRLKKILGDFVDKDLSENGGVIENIILWHTLNTDKSIVENLIKSNYGKIPEIKNALPQLKGLTFNDFGRLSAKLLSGIYTVIAETGELRNIIDTLYETNENLNEILNDERYEFGRIINEENGQADEEVTYETVKKLYVSPAVRRGIWQAMSVTDEYVRAIGRAPDKIFIEVTRTDGKKGDAGRTQPRKRRLQEKFKALCSDGAFDDIIAELDDEKYTDMRLRQERLYLYFRQLGRCMYTGQRISLDDINDTNLYDVDHILPRTFIKDDSLDNKVLVLRSKNAQKSDTYPLPAGFSDQRGFWKLLLDKGLIEKVTYDRLTRTEPLREDEYRDFINRQKVITDQTVKAVAELMRRKYPTAKIVYSKAKNVSDFRKKFKLFKCRETNDLHHARDAYLNVVVGNVYDTVFSTPMAMFRKDGDVWRNYNLKKLFTREVKFAWNESSIAIVKKTYARPSMTVTRYAMCAKGGFYDQTIYGKGEMGITAPRKANGPLSDISKYGGYKSQSTAYFAIVSSTDKKGNKIKTIEAVPVLTAYQAKTDNKAVEKYFADRLSTPEIIVPKLKIKQLISFNGTPCYLAGITGTRIIAHSAVQLFTDNKTDDYVNSLLNLEDMKSKKAVNVGDDKFVMKTDHTGAEKLVIDKATNIALYRDLMRRLGLKIYSGISAFATFAKNMKSGEDKFISLTVCDQATVLLQILKFFKCNAEISDITLIGGSGKSGTVLLNKNITDVDFEIINLSPAGLIERVRKV

SEQ ID NO: 122 - protein, 1332 aa, synthetic construct
  REGION 1..1332: note = MG44-122 effector
MKKFYVGTDIGTNSVGVACTDENYKLLRAKGKDCWTVRLFEEAKTAAERRTFRTARRRLARRRQRIVWLQDLFAPYIEDKTFFIRLNNSQFLSEDKDELLGGNKNNLFAGEYDDRKYHEEFPTVFHLREALITGGKYDLRLYYLALHHIIKYRGHFLFEGSVEEIRDFSRLLKGLNGVLSDLYGDEISAFSETASDEVKTILLDKTKGIKDKQLLLEKLFAVSDKTSKEIIKGIIGAKISPAVLFGEEYKDLKNFSFKETSDDTFEQMRMDYGNNFALLEAMRSIYSYVTFEKLLEGHRDISSAMIAVYDKHNSDLNKLKNFIRTEAKEYYNQIFRNVNEKSNYVNYIGHTIKDGVKKKVKRCKDEEFFAYLKKILSSLNNVNDEACRNAILAELENGTFLPKILHSDNGLFPRQINEAELNRIVTNMVKNYPGTAAFADKILPLFRFRIPYYVGPLTGINSWAVRTAEKVTPWNIEQVVDFAKSNEEFMRRMTNKCTYLRGEDVLPKASVLYQKFDVLNQINKLRVNDMLLPIALKQKIYNELFLVYPRVSDKKIKELLVRENYISAEDAKAIVLKGKDGEFKASMSTYIRLKKILGDFVDKDIESGGGVCENIVLWHTLNTDKKIVENLIRKNYGNIPEIKAAISQLKGLTFNDFGKLSAKFLNGITAINKTTGEIVTILDVLFDTNENLNEILNDENYNFAEVIESENGLADSKVDYSSVEELYVSPAVRRGIWQTLGIIDEYVAAIGKTPDKIFVEVTREDGKKGDEGRTQPRKRQLLEKYKNVGEAYADVIAQLGDEKYSDLKLRQERLFLYFRQLGRCMYSGERIDLENLNTDTYDVDHILPRTYIKDDSLDNKVLVLRSKNAKKSDTYPLPEEFFNQRGFWKMLLEKNLISRTTYDRLTRTEPLGDNDYKDFINRQKVITDQTAKAVIELLGRKYPNTKIVFSKAKNVNDFKNKFNLFKCRETNDLHHARDAYLNVVVGNVYDTVFSTPIAMFRHDGDAWRTYNLKKLFTRDVAGAWSDDIRKTVLDTFAKHSMMVTRYATCNKGMFYDQTVYEKGDSCITAPRRGAGPLADYSKYGGYSSQKTAYFAIVSSIGKKGKRIKTIEAIPVLVDYRSKADPDAIIKYLKTKLNQPEIIVSKLKIKQLVSYNGTLCSIAGITGTQISVHNANQLFTDNKTDEYVCALLKLLDMNSKNMVAHDETEYVIKTNRNGERKLVITKESNIKLYDVLRNKLDSDIYSGISAFKTFKGNLDNSSVIFAELNIIDQAKVIIQVLKALKNNAETADIRLIGGGPQSCRIQINKNITDVDFKIIDLSPAGLTRRIRKV

SEQ ID NO: 123 - protein, 1420 aa, synthetic construct
  REGION 1..1420: note = MG44-123 effector
MSNYDNFRKYGDYYIGLDVGTGSCGWAVTDKSYNILKVSGKSLWGVRLFPTADTAAERRSHRCARRRVFRTRQRLNLLEQLFDPEISKVDVGFFQRLKNSEFKEISKNNLFGDNSYKDKDFFKEYPTIYHLRYKLMNEPVDDIRLLFLAVHHIIKHRGHFLFERLDVNNIGASLPELWEQCCSQFVDISLFSNVSDNFQEIADSLKQNLIDMRDDVINVIRTSSDKRSDLKKVFAQLKSVYDEISDPEVKKSTENKVNRWYLLLLGYKVSAAEIFTIEESDEEGLSCKIKFNSSDYDEQIQKINDEFKGVVESEKAVYDVIKLQEILKDCNSISESKVELFNKHAEELRIFKSLLRERLSENLLAEVNKKVNVAKNEKLTTEPKSFYKEIFEERNKNTEKGKICFYYDITHGDKSANKEAIKGSSIYKRLQILAQILLCSSEINKLSEKEKVLLHRIGDLSIFETQVSADNSVIPYQINLAELDKILKVQSKNFAFLSEKDDAGVSVYDKIKALLTFRIPYYVGPLNNHSKFSWIVKKSQEKIVPWNFESVVDTEKSAEAFIKRMTSKCTYLSGEDVLPKNSIIYSKFMVLNVLNNIRINGMRLDEAQTGLTKKVFDELYCNQINVTQKQLVAYLYNNGFLTSKEELTGFDDEQKVSMSSYVKIKNALGTDNFDINFAESFIKYSTLFPNDYLMIEKRLKREFSSECAKFNENLSKLCRIKFSGWGRLSEKLLTGLLGHNKNSEFDKNSILGFMLNGKGNLMELLSSEYTFSDLISSENLTLDKNDAFSYQNLVEGLYVSPSVKRMIWQTLLVVREITKKIMGYEPSRIFVEMARGATADQKGKRTNSRKKSILALYDKCRKDFDISEIYSSLEKQDDNKLLSDKIYLYYTQLGKSMYTGNKIELEDLLNNSKQYDIDHIIPQSLTKDDSIDNRVLVERTVNEEKDNNYPLSYQIRENQTQFWKHLLDLGLISKSKFERLIRSTSLSNSEKEGFIARQLVETRQSTKAIAGLLSKLYKKAKIIYPKAGLTADFKQKFDLIKVRELNDLHHAKDAYCNIVVGNVYFEKFTSKYQYVIANNERYSFSTSDTSYIFTNQNEKRLQQSGIWDSRNGCSISVVRKNYYRNNILKTIKQEEVKGKLFDLTLYGPSKATIKKKKHLGCEYGGYDKDYNTFFSFISFISKKKKIYRFIGIPLRIVENSNNIHDSIVQYLLDEKFENPQILIEKLPFPFILKNNETGFLYKVSSYEKANKRITLQQFNSLILSIRSQKILKAIESFERKVKLNDKKVNFVYDEKKSGFSEQDLTNLFSELKSKVENTFFNCLPAVITNVLKNIDLQTYRVKEKDSDERLLTIEQKVHVVVELLKAFQSNGASSDLHDIGESKNSGIVRTTELDFEKYSIINYSVTGFYFIETKLRDLIK

SEQ ID NO: 124 - protein, 1455 aa, synthetic construct
  REGION 1..1455: note = MG44-124 effector
MINNLNLSECLDDVVTKEPSDVVSQKDGYYVGLDIGTGSCGWAVTDTKYQVLKKSKKRLWGVRLFPTANTAAERRTFRCNRRRLQRRNWRLNLLKGLFEAEINKVDPVFFMRMKESMLQDDDRTTTARNALFADENYKDKNYAEEYPTIYHLRLNLMEKAPKDIRLLYLAIHHILKHRGHFLFENFNVDNISGSFETIWRNVSNIIVEKVFLNPDLESESIDDDGDDGDLNNNAIERLQSYGQEVLQQLLSLNRNRTDVKKRLLSIFEEALGEKADKNKKKSIEQCVAALVGAKFKPFVCVSDDEPEEEQLKIELCFGSANYETDFATKLGSTQQSVFAILKEVYDFVRLQNLLGGRKSISEAKVEMYKEHSKDLIVLKDLIRNSDHLQDNEKTFLYNNVFKKYDAPVKCVGECLYETILRYRALEIKSTTNTDLAPAKALYGQLMEIAQKFIEMNAAGAVIEPEILKVCNRIVDGTIFSHAVSVENSVIPQQLHAFELKKILENAKAQFPFLNESDEFGTVVDKIIKLHSFRIPYYVGPVNNYVGELNNSGNKHAWCVKNEGVNLPYTPWTFHKIVDTKKSAQEFINRMTSKCTYLRYADVLPKCSILYSEFEVLQELNNIRFNGCKLKHEQISLLIEELYKKDKNVTLKKLKNLLVSRMGFSREDVEVVSGIDLELKGNMASYVQLNELLKSNGIQLKDEKQKIDVMEQIILWVTIFEDTKVLKDKLSQELGYLLNDKVINSVVGLRFAAWGRLSREFLENVLGRVRNDKLDVPVNIMTRLRKGEGNLMMLLSDAYTYSETVAKLNEQSSEVKKYDSISYDMVDELYVSPSVKRMIWQSLKVVDEIVNIMGGVQPKKIFVEMARGEEKKPERTVSRKKYLQDLYQNCRKQEPELAEQLDKVENSSLLNERLYLYYTQFGRCMYSGEAIDLEKLFDSYDVDHIYPRCYVKDDSLDNKVLVKRTLNGIKSKTYPLGAVADIAKNFDVCRPLWTKLRDKGLISNEKYKRLIRTTEFTQDELQSFVARQLVETRQSTKEVCNLLKQVYKDSRVVYSKAGNVSDFRHKFSFIKVRELNCLHHAKDAYLNIVVGNVFDEKFCHGDIRKFFSICSHTEEGYTFREGDTDVFSKPGDRLKKLGVWSGLDQIGAIRKQYRQNDIFVTELQEIRSGQFFDMNLSPKEAGLIPPKDIRVQTKNELVSGEILPKTGLDTSKYGGYKGASTSYFAFIEYTEKNKVVRSFAAVPVYINSMKGNLKDNIKDYFAKNGYASPKVLISQLKMPFFLRDNKTSLTFKVSGVSGNSLLCGLAEQLTLSEKDTAQLKKVVSFLKKLQEDNSYQYSPKFAGFSDSELNELLNILKWKITNTKFKNISEPVTKLLLKITQFDENLVLSIPDKAKLVMNLVGIFENRDHTNDLSLIGGKKQMGRLKKSIKPKGDFSIVYQSVTGFYVHEIKLNELK

SEQ ID NO: 125 - protein, 454 aa, synthetic construct
  REGION 1..454: note = MG44-125 effector
MGTGSCGWAVTDKSYNILKVSGKSLWGVRLFPTADTAAERRAHRCARRRVFRTRQRLNLLEQLFDPEISKVDVGFFQRLKNSEFKEISKNNLFGDNSYKDKDFFKEYPTIYHLRYKLMNEPVDDIRLLFLAVHHIIKHRGHFLFERLDVNNIGASLPELWEQCCSQFVDISLFSNVSDDFQEIADSLKQNLIDMRDDVINVIRTSSDKRSDLKKVFAQLKSVYDEISDPEVKKSTENKVNRWYLLLLGYKVSAAEIFTIEESDEEGLSCKIKFNSSDYDEQIQKINDEFKGVVESEKAVYDVIKLQEILKDCNSISESKVELFNKHAEELRIFKSLLRERLSENLLAEVNKKVNVAKNEKLTTEPKSFYKEIFEERNKNTEKGKICFYYDITHGDKSANKEAIKGSSIYKRLQILAQILLCSSEIYKLSEKKKSFCTGLAIYLFLKHKFLWIIP

SEQ ID NO: 126 - protein, 972 aa, synthetic construct
  REGION 1..972: note = MG44-126 effector
MHRIGDLSIFETQVSVDNSVIPYQINLAELDKILKVQSKNFAFLSEKDDAGVSVYDKIKALLTFRIPYYVGPLNNHSKFSWIVKKSQEKIVPWNFESVVDTEKSAEAFIKRMTSKCTYLSGEDVLPKNSIIYSKFMVLNVLNNIRINGMRLDEAQTGLTKKVFDELYCNQINVTQKQLVAYLYNNGFLTSKEELTGFDDEQKVSMSSYVKIKNALGTDNFDINFAESFIKYSTLFPNDYLMIEKRLKREFSSECAKFNENLSKLCRIKFSGWGRLSEKLLTGLLGHNKNSEFDKNSILGFMLNGKGNLMELLSSEYTFSDLISSENSTLDKNDAFSYQNLVEGLYVSPSVKRMIWQTLLVVREITKKIMGYEPSRIFVEMARGATADQKGKRTNSRKKSILALYDKCRKDFDISEIYSSLEKQDDNKLLSDKIYLYYTQLGKSMYTGNKIELEDLLNNSKQYDIDHIIPQSLTKDDSIDNRVLVERTVNEVKDNNYPLSYQIRENQTQFWKHLLDLGLISKSKFERLIRSTSLSNSEKEGFIARQLVETRQSTKAIAGLLSKLYKKAKIIYPKAGLTADFKQKFDLIKVRELNDLHHAKDAYCNIVVGNVYFEKFTSKYQYVIANNERYSFSTSDTSYIFTNQNEKRLQQSGTWDSRNGKSISIVKKYYKRNNILMTYKQEERIGALFNQTLYGPEKGTIPKKKNMSCHDYGGYDSDQNSFFSFISYKDDKGNLKTKLIGIPLRVVYGLSDKSSAISHYLLTEKSNEYIDPKVLIDFLPYNFILKDNETGFLARVVSYATKGRQLVLKQFNSLILNEKNNKMLKAIDNFVSRLKNKSFEVKYDKDKSGFTEEDLSSIYSELKDKTKNTVLKALPKTTVKILTDVDINSYQYSENEKSEPKLLSIEQKAVAICEVIKAFHTEPSDLSLLGGKANSGKMCINSVLNLDKDDYSVVFYSITGFYEKELRLSDLLK

SEQ ID NO: 127 - protein, 1418 aa, synthetic construct
  REGION 1..1418: note = MG44-127 effector
MEEIYLGLDIGTNSCGYAVTDGNYNLVRIGGKDAWGVRLFEKAETAQERRAKRTARRRIVRKKLQNMWLRQLFEKEIEKVDPSFFTRLKYSNLNLEDKILSDKNLTSKYSLFNDTVKQVFTDKEYYEKYETVYRLRKELLSSPAEDVRLLYLAIHSILTHRGHFLSETDFSSTVPIEDSFNILLEKLGEYSVEFNDSKNALTIKPDKISVIFLLLEDFSQGLSYRQVKENFEKNLDVKTKLDKTVASILLSGKFKTTDVFAVEKEDAVKVDFNDEKYEEVYGTLAGQLSETELAILNLLKDLYSNIELKKLLGKNNYICEAMVERYKKHNEQLKELKTFVKTYFPSKKNLVFNAQKTSKKEKGEKARKIANYAAYCYSDLKDGKKQIIDGVASREDFYKFIKSELLECAPEVEADLVKFEEQKQKILNSIEKNDYLLKIRSHDNIVLPNSLYKVELQQILKINEKKFEFLSEKDEKGKTISEKIVDVICFKIPYFVGPIGQSERGWIRKDKNLDFKPWTLNEIINFDEAEDKFIQNMTSKCTYLPTEDVLPKDSLLYSKFRVLNELNNLKVNGNEISVETKQRIFKGLFEKFKKVSKNKLIEFLKQENIYPKNESIVITGIDNEFANNYSSYVTLINKFGEEFVNKNYDVFEKIIKYHTIISDKLRLEKRIKREFKIFSNEDVKFLKSLNYSGWGKLSGKFLNGIKFTDKKSNSPEFESKTIISAMWETNKNLQEVIFCKEYNLLEKLEANIEKIQRDLVYEDVQNMYTSPSVKRGTWQAISIINELKSKLGKYPDKIFIEVTRNDQEKGDSGRKDSRFGAVVKKYKDKALKEDCLKEAINYNNLLDELNKRNNSHLRSEKLFLYFMQLGKDAYTGEPIDISELGNDNAYNVDHIIPRSKVKDDSLDNKVLVSAAANLAKGDEYPLKRNIQFAQRDFWKMLNKNGLMSDKKLARLERTEEFTDKDADDFTNQQLVSTNQESKAVIDLLCKVYDNRRNIVFSKAMFVSEFRNRYNIFKSRDVNDLHHAKDAFLNVVVGNVLFNRFTEGYWKKDKNKDIKILEEDSQDVAGEDKNEKLTSVVDKVFSRYVWSNQTGEVVWKGWKDVRRIQETCYRSSPVISIMPYVNRNGAFYDETIYKKKNDGEKFKAAFALKGKGPMSSIEKYGGFNSVNNAYFMVVESVDNKGKVKKTIECVPIIVEYKYRNNPDRKQKIIKYVEEANNIKITRVIKDELKFRSVLKINDGLYMLTAKTGDSFKVLKLNQWYVSNNDTGYIKILEKYKNMPQVAKECLKEDGERLVVSPAVKENSRPQIITRTQNVALYDLIINQLSKKIYALSSIKAIVSNLKDKRDLFIALSIPNQAEVLLNLVKYVGGGYLVDLKLIGGTEQMGTTRISKDITNLNISLIEQSVTGLYSKGRKL

SEQ ID NO: 128 - protein, 1334 aa, synthetic construct
  REGION 1..1334: note = MG44-128 effector
MKKFYIGADIGTNSVGVACTDESYRLIRAKSKDCWAVRLFDEGETAFDRRTKRTARRRLARRKQRINWLQELFEPFIDDKTFFIRLNNSQYLPEDKDSLLCGNKNNLFENEGEESKFYKKYPTIYHLRKALMDGGNFDIRLYYLALHHIIKYRGHFLYEGSIEDIRDFSNLMKGLDCAIADSYDGGLNLFDSVDSAKVRDILIDKKSGLRDKQVELEKLLCAKSKREKEILKGITGQKISPYVLFGDEFKEEKSFSLNDMSDEEFESKRSSYGESFTLLDLMHSVCNYVKFEKIFEGHSDISSAMISVYEKHKADLVLLKKVVRKQSKEDYNKIFRSVNEEKNYVNYIGYTSKDGRKIKVKKCKDEDFFKYLKKYLNGILNEDNFDIVSKIIKEIDDRIFLPKILHSDNGLFPKQVNEFELKKIIENMVRNYAETEEMASAVLSLFNYKIPYYVGPLTGCNSWVVRTDEKVTPWNFDRVVDLAKSNEAFMRRMTNKCAYIKGEDVLPKASIIYQKYDTLNQLNKLRINDRVISIELKQTIYNELFLKYPKVTDKKIKELLVREGLCSSSETKDITISGKDGDFKSSMSSYIRLKNILGDFVDDDLKSGGKVCENIILWHTLNTDKKIVEDLIEKNYGFIPEIKANIKQLKGLTFNDFGRLSAKLLIGIEGVDKTTGQILTILDVLYQTNQNLNEVLNNESYNFSEIIDEENGIETEIISYETVEELYVSPAVRRGIWQTLLMIDEYVNAVGRQPDKIFIEVTRNDGKKGDNGRTQPRKRQLQEKFKNIGSAYSDIIEELSEEKYTDLKLRQERLYLYFRQLGRCMYTGERIILDELNGNRYDVDHILPRTYVKDDSLDNKVLVCRGANATKADTYPLPTEFSRKEVRAHWKMLLDKDLISKTTYDRLTRIEPLKDDDYNDFINRQKTITDQTAKAVIELLKRKYPNAKLIFSRAKNVNDFKNRFNLFKCRETNDLHHARDAYLNVVVGNVFDSVFSTPLGQSRKDGDVWRIYNLKKLFTRDVIGVWSKDSIKIVKDTYSKPSMSVTRYATCNKGKFYDETVCRKDDSAITAPRKGKGPLSDVTKYGGYTTQKTAYFAIVTSVDKKGKSIKTIEAIPVLVTYKLKTDTNAIQKYLESYLREPIIVIPKVKVKQLVSYNGSLCYLAGITNNQITVHNASQLYTDNTTDEYVNELIKIIGMGDNGIITGNESQYITKTNKDGVIRIVVNKENNEKLYETLKNKLDSKIYKGLSAFASFKKNMERGKDKFCELSVLEQAKVLLQILKVFRCNAEISDIQAIGGTAHSGKKLFAKNITDVDFKLVNLSPAGLTVRIRKV

SEQ ID NO: 129 - protein, 1396 aa, synthetic construct
  REGION 1..1396: note = MG44-129 effector
MTLYNRAKQNKRGGDGKKNALPKRKSGSHTAKSGQTKFLFELALLFCKYILPHKKIKVKGKTTMEKFYLGMDIGTNSVGMACTDENYKLLRAKGKDCWSVRLFDESKTALERRTYRTSRRRLQRRKYRLALLQELFAPFIDDKTFFIRLNNSQFLPEDKDGALFGDKNNLFNDPALDDKTFHGQFPTIYHLRKVLIDGGDYDLRLYYLALHHIIKYRGHFLFEGSMNDIRNINRLFTALNDTLKNVYGDDEAPEFAATSAEKAKEILLDPKKNIRDKEQELEKLFGAESKLEKEIIKGMCGAKISPSVLFGESFKEEKSFSFKELTDETFDAMRQTYGDNFALPEALRAIYSFVTFEKLLVGKPDISSAMIAVYEKHKSDLKLLKDFLRAESGEIYGKVFKSTSEKANYVNYVGYTKKGGDKKKVKTCGYEEFRQYLKKTIAAIDAKDKETQNLILSELENGSFLPKILHSDNGLFPHQVNEDELVKIADNMAKNHPETTDMAKKLRKLFLFRVPYFVGPLAGENSWAVRKTDEKVTPWNFDDVIDKAASNEEFMRRMTNHCSILHAEDVLPKCSMIYQKYNVLNQLNKLKINDCPLPSVELKQKIFNELFLKYNKVSDKKIIDLLVRSGEVSPEEARAITLTGKDGELNASMSSYITFKNILGDFADKPENAEILEKIILWHTLNTDKKIVEDLILKHFGKIPEIKNNVKALKGLVFKDFGRLSEKLLTGLKAADKETGELLSITDILYETNQNLNEILANERYNFAELIKAENGEESDEIGYKDIEELYVSPAVRRGIWQSLIMADEYINAVGKVPDRIFIEFTRTDETKGEAGKKLSRKKQLSDKFKAIKDAEFQDIIAELNSDEITDMKLRQERLYLYFRQLGKCMYSGMQIDLSALNTDMYDVDHILPRSYTKDDSIDNKVLVRRTCNAKKTDIYPVPAEFRQVKLWKLLHEKELISKKTFDRLMRTEPLGEGDYEDFINRQKVITDQTAKAVAELLQKKYPTSQIVYSKAKNVVDFKNKFGLYKCRETNNLHHARDAYLNIVVGNVYHTCFSTPMAMFYKKDDGWRENNLKTMFTRNVKGAWDENSLQLVKSTFKKHTMAVSQYAFCYNGMFYDQTVYPKGDPGITAPRKGSGALADVEKYGGYKSQKTSYFAIVQSKGKKGQTIKTIEAVPVLTAYRQRTNPDALLDYFKTYLTEPTILIPKLKVRQLVSYNGTPVYIAGITGDYIIAHNANELFTDNKTDEYVNQLSKLVEMAKNETISEENGEYIIKTNRNKDVKLTINKHSNIELYDTLKNKLSKPSYQGLSPFSTFRKNLEGGEEKFANLSVADQCTVLLQILKFFKCNAETADIVLIGGSGRSGCILFNKDVSKADIKIICKSPAGLTERIKKV

SEQ ID NO: 130 - protein, 1337 aa, synthetic construct
  REGION 1..1337: note = MG44-130 effector
MEKFYIGTDIGTNSAGVACTDENYNLLRVKGKDCWTVRLFDEGKTAVDRRTFRTGRRRLQRRKQRIAWLQDLFAPYMEDETFFIRLNNSQFLPEDKDALLGGDKNTLFAGVYDDKKFHTEFPTVYHLREALMRGGVNDLRLYYLALHHIVKYRGHFLTEGSVDDVRDFGRLLGELNEGDSRVYGDDFPTFSEAAVDEAKNVLLDKTLGIKDRSSKLEKIFGVSDKTSKEIIKGMCGGKISPAVLFGDEYKEEKSFSFKEITDDNFESMRGTYGDNFTVLEVIRSIYGYVIIENLLLGHDDLSSAMIAVYDKHKKDLLALKAFIRSERPEDYNKIFKSTDEKYNYVNYIGYTKKGRDKKKVKKCKDDEFYAYIKKYLQGLTDVKDVAARDKFLKDIEAGSFMPKILHSDNGLFPRQINEVELKKILDNMVKSFPATAEIKDKIVTLFNYKIPYYVGPLAGKEETCWAVKKSNEKITPWNFDDVIDKAKSNEKFMLRMTNKCSYLRGEDVLPKASIIYQKFDTLNQLNKLRVNDELLSVDLKQKIFNELFLKYPKVSDKKIIDLLVREGKISQNDRSEVTLSGKDGEFKASMSSYIYLKNILGDFVDKDLSENGGVCENIILWHTLNTDKNIVVDLIKENYGKIPEIKNAIKQLKGLGFHDFGRLSRKLLCEIYTVKEDTGELWNVLDALYETNENLNELLNDEKFSFGRNIKEENGEMTSDVGYKDVEELYVSPAVRRGIWQTLTVVDEYVKAIGKAPDKIFVEVTREDGIKGDAGRTQSRKRRLQEKFRTVSDAYADVIAELGEERFTDLKLRQERLFLYFRQLGRCMYTGERIDLNNINDITRYDVDHILPRTFIKDDSLDNKVLVLRSKNAKKSDTYPLPAGFSNQRDFWKMLLDKGLIAKVTYDRLTRTEPLREDEYQDFINRQKVITDQTVKVVAELFKRRYPTAKIVYSKAKNVNDFKQKFDLFKCRETNDLHHARDAYLNVVVGNVYDTVFTTPMSMYRKDGDVWRTYNLNKLFTRDVKGAWDNAQSIATVKKVYSKNSMVVTRYATCNNGGFYNATVYSKDEKGITAPRKGKGPLSDSSKYGGYMTQPTAYFAIVSSKDKNGNEIKTIEAVPVLTAYVAKNDPKAVEKYFTGRLKDAKIIVPKIKIKQLASYNGTLCCLAGTTDNRILVHNAVELFTDGKTDEYVNSLLKLADMKAKGIINVGQEEFVMKTNRDGERKLVIDRANNANLYDMLKRKLERENYAGLSAFATFRKNLEKGEEKFNSLTVYEQTVVLLQILKFFKCNAETADTTLVGGSAKSGSIKFNNNITNVDFRLIDLSPAGLTERVRKV

SEQ ID NO: 131 - protein, 1407 aa, synthetic construct
  REGION 1..1407: note = MG44-131 effector
MEKNLEYFVGLDIGVESCGACVTDKDYNILNVDGKDLWTVRLFDSAETASDRRAKRASRRLLQREKERISLLQSLFYEEVSKVDPNFFARLKASSFWEDDKLKAGLKSRNSLFFDDKLDDKKFYKLYPTIYHLQDELLKEPAKDIRFLYLAIANMFKHRGNFLLESFNLQEDNLANLFKTFNDKISECEEFEFLKFNVSENELDKILKIEQELAEKPLKTSVLEQKFSAVFENVNSNQKALIKAICGGKINLKAIFEQKASKTKGKSEENEFACEAKIDNFGVDDSVIEQFLLEVEEESQNASEILELAKNVYDRIVFKKLLGNEDYFCSAMKNRYFEHKKQLKNFKEVIKKFYPESYSQVFKIADSKINNYVKYIKGSRTADEGTSKDSAKCSRAEFYTYVKKLLESKKECTEQKEVAEILNEIENNNFLLKLRINENSTIPYQINKIALIKMLENSQSKFPFLLKVDESGLSVKDKIVSIFEFRIPYFVGPLSKKNSQNAWIEKKLNEKIYPWNFEKVVDLEKCEKEFIKRMQNSCTYLQQEPVLPKNSLLYCEYMVLSELNNIKINGEKLDRETKQQIFELFKIHGIVKISQIKSMLKQNGKVSLDQDVVISGIDENKFNCNYNIYKQFNNILNGEIESKRNEVEDIIYYATVISDKLRFEKWLSKNYGAMLTNAQIKKIKGLKIEGWGKFSKKFLDGIVGIDTKTGEARTIIDLMRDNSLNLMEILFNYDFSEAFSALKVKNDASLKITYKDVEDLYCSPAVKRGVYQAVQIVNEYERILGKKPAKIFVEVTRGEDNLNNNDKNERKKKLLEIYKQVDKSMFDEDFVALKERLENEDNSKLNSERLFLYYTQGGKCMYSGEPINFETELFSSTCDIDHIIPQSVFKDDSLNNKVLVKRTYNESKTNLRLVPKVYQTKMEGYWRILNKNGMISNEKLNRLIRTTEYSPEELKEFASRQLIFTGQTNKAVIDLFKSVYGEDKVIFSKAKFVSAFRNCEFEFDKDIEFKNLLFADELKQSLVKNRELNDLHHAKDAYLNIVVGNVFYEKYTKKFYLKDNSNYNFNLNNAFKFDTPGVFEKDKHIKTIIGMMNKNTPTVTFLSRQEKGKFYDETLYGIKKHQKDFKTLDEIKEYVETNKNANDKIPLKSFKNPLSQTIKYGYYNSAKTSYFTLIKNTKNGQKTIVAVDYLYCKDFKNQDDLKRYIINKLGHANFEIVIDKINIGSIFKIGCGLFKLAGKTGEQLKLHNFNQLYLPNKFNRYFKLVSKTLIKLNKGVEPVLQDGKIVVNQNRLGEIDYVTKEENLDLFKALINHFNKPIYNYISTFKTIAKHLINNIENFVNLDIQQQILLTSELLKVINGKSGGNLKAIGLKANSGIIRMSQNINKDLPIRLVHYSKTGHYCREITI

SEQ ID NO: 132 - protein, 1353 aa, synthetic construct
  REGION 1..1353: note = MG44-132 effector
MINNLNLSECLDDVVTKEPSDVVSQKDGYYVGLDIGTGSCGWAVTDTKYQVLKKSKKRLWGVRLFPTANTAAERRTFRCNRRRLQRRNWRLNLLKGLFEAEINKVDPVFFMRMKESMLQDDDRTTTARNALFADENYKDKNYAEEYPTIYHLRLNLMEKAPKDIRLLYLAIHHILKHRGHFLFENFNVDNISGSFETIWRNVSNIIVEKVFLNPDLESESIDDDGDDGDLNNNAIERLQSYGQEVLQQLLSLNRNRTDVKKRLLSIFEEALGEKADKNKKKSIEQCVAALVGAKFKPFVCVSDDEPEEEQLKIELCFGSANYETDFATKLGSTQQSVFAILKEVYDFVRLQNLLGGRKSISEAKVEMYKEHSKDLIVLKDLIRNSDHLQDNEKTFLYNNVFKKYDAPVKCVGECLYETILRYRALEIKSTTNTDLAPAKALYGQLMEIAQKFIEMNAAGAVIEPEILKVCNRIVDGTIFSHAVSVENSVIPQQLHAFELKKILENAKAQFPFLNESDEFGTVVDKIIKLHSFRIPYYVGPVNNYVGELNNSGNKHAWCVKNEGVNLPYTPWTFHKIVDTKKSAQEFINRMTSKCTYLRYADVLPKCSILYSEFEVLQELNNIRFNGCKLKHEQISLLIEELYKKDKNVTLKKLKNLLVSRMGFSREDVEVVSGIDLELKGNMASYVQLNELLKSNGIQLKDEKQKIDVMEQIILWVTIFEDTKVLKDKLSQELGYLLNDKVINSVVGLRFAAWGRLSREFLENVLGRVRNDKLDVPVNIMTRLRKGEGNLMMLLSDAYTYSETVAKLNEQSSEVKKYDSISYDMVDELYVSPSVKRMIWQSLKVVDEIVNIMGGVQPKKIFVEMARGEEKKPERTVSRKKYLQDLYQNCRKQEPELAEQLDKVENSSLLNERLYLYYTQFGRCMYSGEAIDLEKLFDSYDVDHIYPRCYVKDDSLDNKVLVKRTLNGIKSKTYPLGAVADIAKNFDVCRPLWTKLRDKGLISNEKYKRLIRTTEFTQDELQSFVARQLVETRQSTKEVCNLLKQVYKDSRVVYSKAGNVSDFRHKFSFIKVRELNCLHHAKDAYLNIVVGNVFDEKFCHGDIRKFFSICSHTEEGYTFREGDTDVFSKPGDRLKKLGVWSGLDQIGAICKQYRQNDIFVTELQEIRSGQFFDMNLSPKEAGLIPPKDIRVQTKNELVSGEILPKTGLDTSKYGGYKGASTSYFAFIEYTEKNKVVRSFAAVPVYINSMKGNLKDNIKDYFAKNGYASPKVLISQLKMPFFLRDNKTSLTFKVSGVSGNSLLCGLAEQLTLSEKDTAQLKKVVSFLKKLQEDNSLNNPGLITPSVRTMETAIPV

SEQ ID NO: 133 - protein, 1337 aa, synthetic construct
  REGION 1..1337: note = MG44-133 effector
MEKFYIGTDVGTNSAGVACTDENYNLLRAKGKDCWAVRLFDEGKTAVDRRTFRTGRRRLQRRKQRIAWLQDLFAPYMEDETFFIRLNNSQFLPEDKDALLDGDKNTLFAGVYDDKKFHTEFPTVYHLREALMRGGVNDLRLYYLALHHIVKYRGHFLTEGSVDDVRDFGRLLGELNEGDSRVYGDDFPTFSEAAVDEAKNVLLDKTLGIKDRSSKLEKIFGVSDKTSKEIIKGMCGGKISPAVLFGDEYKEEKSFSFKEITDDNFESMRGTYGDNFTVLEVIRSIYGYVIIENLLLGHDDLSSAMIAVYDKHKKDLLALKAFIRSERPEDYNKIFKSTDEKYNYVNYIGYTKKGRDKKKVKKCKDDEFYAYIKKYLQGLTDVKDVAARDKFLKDIEAGSFMPKILHSDNGLFPRQINEVELKKILDNMVKSFPATAEIKDKIVTLFNYKIPYYVGPLAGKEETCWAVKKSNEKITPWNFDDVIDKAKSNEKFMLRMTNKCSYLRGEDVLPKASIIYQKFDTLNQLNKLRVNDELLSVDLKQKIFNELFLKYPKVSDKKIIDLLVREGKISQNDRSEVTLSGKDGEFKASMSSYIYLKNILGDFVDKDLSENGGVCENIILWHTLNTDKNIVVDLIKENYGKIPEIKNAIKQLKGLGFHDFGRLSRKLLCEIYTVKEDTGELWNVLDALYETNENLNELLNDEKFSFGRNIKEENGEMTSDVGYKDVEELYVSPAVRRGIWQTLTVVDEYVKAIGKAPDKIFVEVTREDGIKGDAGRTQSRKRRLQEKFRTVSDAYADVIAELGEERFTDLKLRQERLFLYFRQLGRCMYTGERIDLNSINDVTRYDVDHILPRTFIKDDSLDNKVLVLRSKNAKKSDTYPLPAGFSNQRDFWKMLLDKGLIAKVTYDRLTRTEPLREDEYQDFINRQKVITDQTVKIVAELFKRRYPTAKIVYSKAKNVNDFKQKFDLFKCRETNDLHHARDAYLNVVVGNVYDTVFTTPMSMYRKDGDVWRTYNLNKLFTRDVKGAWDNAQSIATVKKVYSKNSMVVTRYATCNNGGFYNATVYSKDEKGITAPRKGKGPLSDSSKYGGYMTQPTAYFAIVLSKDKKGNEVKTIEAVPVLTAYMARTDPKAVEKYFTGRLKDAKIIVPKIKIKQLASYNGTLCCLAGTTDNRILVHNAVELFIDGKTDEYVNSLLKLADMKAKGIINVGQEEFVMKTNRDGERKLVIDRANNADLYDMLKRKLERENYAGLSAFATFRKNLEKGEEKFNSLTVYEQTVVLLQILKFFKCNAETADTTLVGGSAKSGSIKFNNNITNVDFRLIDLSPAGLTERVRKV

SEQ ID NO: 134 - protein, 1337 aa, synthetic construct
  REGION 1..1337: note = MG44-134 effector
MEKFYIGTDIGTNSAGVACTDENYNLLRVKGKDCWAVRLFDEGKTAVDRRTFRTGRRRLQRRKQRIAWLQDLFAPYMEDETFFIRLNNSQFLPEDKDALLGGDKNTLFAGVYDDKKFHTEFPTVYHLREALMRGGVNDLRLYYLALHHIVKYRGHFLTEGSVDDVRDFGRLLGNLNGVISDVYGDEVPLFSEAAVDEAKNVLLDKTLGIKDRSSKLEKIFGVSDKTSKEIIKGMCGGKISPAVLFGDEYKEEKSFSLKEITDDNFESMRGTYGDNFTVLKVIRSIYGYVIIENLLSGHDDLSSAMIAVYDKHKKDLLALKAFIRSERPEDYNKIFKSTDEKSNYVNYIGYTKKGGDKKKVKKCKDDEFYAYIKKYLQGLTDIKDVAARDTFLKDIEDGSFMPKILHSDNGLFPRQINEVELKKILDNMVKSFPATAEIKDKIVTLFNYKIPYYVGPLAGKEETCWAVKKSNEKITPWNFDDVIDKAKSNEKFMLRMTNKCSYLRGEDVLPKASIIYQKFDTLNQLNKLRVNDELLSVDLKQKIFNELFLKYPKVSDKKIIDLLVREGKISQNDRSEVTLSGKDGEFKASMSSYIHLKNILGDFVDKDLSENGGVCENIILWHTLNTDKNIVVDLIKENYGKIPEIKNAIKQLKGLGFHDFGRLSRKLLCEIYTVKEDTGELWNVLDALYETNENLNELLNDEKFSFGRNIKEENGEITSDVGYKDVEELYVSPAVRRGIWQTLTVVDEYVKAIGKAPDKIFVEVTREDGVKGDAGRTQSRKRRLQEKFRTVSNAYADVIAELGEERFTDLKLRQERLFLYFRQLGRCMYTGERIDLNNINDVTRYDVDHILPRTFIKDDSLDNKVLVLRSKNAKKSDTYPLPAGFSNQRDFWKMLLDKGLIAKVTYDRLTRTEPLREDEYQDFINRQKVITDQTVKVVAELFKRRYPTAKIVYSKAKNVNDFKQKFDLFKCRETNDLHHARDAYLNVVVGNVYDTVFTTPMSMYRKDGDVWRTYNLNKLFTRDVKGAWDNAQSIATVKKVYSKNSMIVTRYATCNNGGFYDQTIYGKDEKGITAPRKGKGSLSDSSKYGGYMTQPTAYFAVVSSKDKNGNEIKTIEAVPVLTAYMAKNDPKAVERYFSERLKDAKIIIPKIKIKQLASYNGTLCCLAGITDNRILVHNAVQLFTDGKTDEYVNSLLKLADMKAKGIINVGQEEFVMKTNRDGERKLVIDRANNANLYDMLKRKLERENYAGLSAFATFRKNLEKGEEKFNSLTVYEQTVVLLQILKFFKCNAETADTTLVGGSAKSGSIKFNNNITNVDFRLIDLSPAGLTERVRKV

SEQ ID NO: 135 - protein, 1336 aa, synthetic construct
  REGION 1..1336: note = MG44-135 effector
MNENKSFYVGLDIGTDSVGVACTDENYNLRRSNGKDCWAVRLFDAANTAQERRSFRTARRRLQRRKYRLGQLQALFALYIDDDKFFIRLNNSQFFVDDKDECLSADKNTLFADSGYTDKEFYEAFPTIYHLRLALQNGHASDIRLYYLALHHIVKYRGHFLFEGSVGDIRDIKKLFVDLNTACEAVYADEVPYFDTQLCEQAKNTLMKPSGIRDKQKALEALFGGTSKAQSEIIKAMCGGKLAPKTMFEGRYEEEKSFSLSEMQDEAFDALAEVFGDDFVLLQALRNLCNFVKFEKLFAGQPNISSAMIAVYDKHAADLAMLKIFLKTYAPQMYNKVFRSVTESANYVNYIGYNKKKLAKTKVAPCKYEDFLAFVKKIVAAVDCADTELRDKILAEIDNKTFLPKILHADNGLIPHQVNEDELVKIVKSMTEAFPETQAMAKQILPLFRFRIPYYVGPLVGENSWAVRKSDERITPWNFNEVIDLAASNEQFMRRMTNKCTYLHGEDVLPKCSIVYQKFNTLNQINKLQVDGRAISVELKKKIFNELFLTKSKVSDKAIVDLLVREGVVSPQERANVVLSGKDGEIKASMSSYIQLKRILGDFVDEDLASDGGVCENIILWHTLNTDKSIVEDLIRRNYGDNPHITPYIKQLKGLMFADFGRLSDKLLTGLRTVDKSTGELRSILDLLYDTNQNFNEIIFDERYDFAELIRKENSGESTEITYEEDIATMRVSPALKRGIWQSLQLVDEYVVALCGTPDKIFVEVTREDGVKGNDGRTVSRKKQLLEKYKGVENIDELVAELQSDDVSDMRLRQEKLYLYFRQLGRCMYTGKRIDLSQLNTDLYDVDHILPRTYIKDDSLDNKVLVLRSKNAEKSDAYPLPQGFSNQAPFWKLLLDKGLIGEKTYKRLTRTAPLTDDDYNDFINRQKTITDQTAKAVVELLKRKYPQAKVAFSKAKNVSDFKQKFDLHKCRETNDLHHARDAYLNIVVGNVYDACFTTPMAQFRKDGEWRTYNLKTMFTRNVKGAWDENSLATVKKTYSKCSMSVTEYTYCGKGAFYNQTVYGAGDTSVTAPRKANGPLANTARYGGYKSQNTAYFAIVDSPGKKGVTQRTIEAIPVMVAYRATTDTNAVYDYLTNTLQLRDVKVVVPKVKKNQLVSYNGSLVRLTGVTGVYITTNNDRQLFTDNKTDEYVNQLLKLLEMDKNGRVDKTASEYVMKTNRMGDIKLVVDKAHNEKLYDCFVEKLQSGKYGNLSSFVTFGKNLQNGQEKFANLTTLEQAYVIVQILRFFKCDAQTADIRLIGGSGLSGKVLFNKDITTIDFQLVDQSPCGLTVRTRKL

SEQ ID NO: 136 - protein, 1369 aa, synthetic construct
  REGION 1..1369: note = MG44-136 effector
MEEKEKAGKFYLGMDVGTNSVGMACTDENYALLRAKGKDAWCVRLFDEAETAASRRTARTARRRVKRRRYRINLLQELFAPFIHDETFFIRLNNSQFFPEDKDEKLGGDKNALFADSGYADKDFHKEFPTIFHLRKALSGGKKKYDPRLYYLALHHIVKYRGHFLYEGEAANVHDIRALIEKLNAALVAVYGDGAVSFDISDNNFADEAKRLLTDDLTPSDKQKKLAIFFKPAAAEDKKIVKAITSGICGLTVSPKDLFGEEYKEEKSFKFSELDEEKFEGMRATYGDDFELLEAIRAIYSFAIFEKLLAGKDGISDAMIGLYDRHKSDLKLLKAFVKKYLPDKYNEVFKSTGIKKADGKTEKINNYVAYVGYTKKGGEKKKVAKCKDEEFRDYVEKILEEAVKSNLEAKAGGDYDYIKQACENGEFMPKILHADNGLFPHQVNGEELGKILSSLQNFYPEVTDEFVKKVKTLFAFRVPYYVGPLAGNGDNHWSVRKADGRILPWNFGDKIDLAASNEAFMRRMTNKCAYLRGEDVLPKASVLYQKYDALNQLNKLRVNDKPVSVELKKRIFDELFTKYPRVTDKKIVDFLVKNGYAANGEKPAISWKDGDFKASMSSYINLKKILGDFVDEDYARGGEVCENIILWHTLNTDKNVVEGLIKRNYGNIPAIRANIKQLKGLTFRDFGRLSKKLLTGLEFADKRTGEIGNLLYFLYERNLNLNEFIFSDEYTLKEKIEEANGGYEVADIDELIEESYVSPAVKRGIRQSLTMADEYVEALGRNPDKVFIEVTREDGQKGDKGRTVSRKRQLSEKYKAITSADFEGIDNVAAELGRDDMTDMRLRREKLYLYFRQLGRCAYSGKPIDLEALNKDGASKRYDVDHILPRTFVKDDGLDNKVLVLRECNALKSDTYPLPNDLRQNSLWKLWLNKGLIGRKTYERLTRTESLGDSDYADFENRQKVITDQTAKAVAGLMKIKFPNSKIVYSKAKNVSDFRQRFDLFKCRETNDLHHARDAYLNIVVGNVYDVRFSGNFRYKDGDAWREYNLKNLFTRDIRGAWNTATSEETVKKTYGKNSMIVTRLAVCGKGGFYNQTVYGSGDGSITQPRKTIGPLSDPSKYGGYKSENTAYFAIVRSTDKKGKRVTTIEAIPVLTSYREKKDTGAVTEYLTKTRGLADLEIVVPKVKVKQLFRYNGTLLYIAGITGKQITAHNATELFTDNKTDEYVRELAKLSAMRKEKKIDETQERYIMKTNALGEEKLVIDRDRNLAFYNLLVEKLGKDRYKGVSAFGVILGYLSKGKDAFMCLSVVNQVQVLLEILKFLRCTADAADLRLLNGSQQSGKIVFNQDITNVKFELVYRSATGLTERVRKI

SEQ ID NO: 137 - protein, 1333 aa, synthetic construct
  REGION 1..1333: note = MG44-137 effector
MEKFYLGMDIGTNSVGMACTDENYKLLRAKGKDCWSVRLFDESKTALERRTYRTSRRRLQRRKYRLALLQELFAPFIDDKTFFIRLNNSQFLPEDKDGALFGDKNNLFNDPALDDKTFHGQFPTIYHLRKALIDGGDYDLRLYYLALHHIIKYRGHFLFEGSMNDIRNINRLFTALNDTLKNVYGDDEAPEFAATSAEKAKEILLDPKKNIRDKEQELEKLFGAESKLEKEIIKGMCGAKISPSVLFGESFKEEKSFSFKELTDESFDAMRQTYGDNFALPEALRAIYSFVTFEKLLVGKPDISSAMIAVYEKHKSDLKLLKDFLRAESGEIYGKVFKNTNEKANYVNYVGYTKKGGDKKKVKTCGYEEFRQYLKKTIAAIAAKDKETQNLILSELENGSFLPKILHSDNGLFPHQVNEDELVKIADNMAKNHPETTDMAKKLRKLFLFRVPYFVGPLAGENSWAVRKTDEKVTPWNFDDVIDKAASNEEFMRRMTNHCSILHAEDVLPKCSMIYQKYNVLNQLNKLKINDCPLPSVELKQKIFNELFLKYNKVSDKKIIDLLIRSGEVSPEEARAITLTGKDGELNASMSSYITFKNILGDFADKPENAGILEKIILWHTLNTDKKIVEDLILKHFGKIPEIKNNVKALKGLVFKDFGRLSEKLLTGLKAADKETGELLSIIDILYETNQNLNEILANERYNFAELIKAENGEESDEIGYKDIEELYVSPAVRRGIWQSLIMADEYINAVGNVPDRIFIEFTRTDETKGEAGKKLSRKKQLSDKFKAIKDAEFQDIIAELNSDEITDMKLRQERLYLYFRQLGKCMYSGKNIDLSLLNTDTYDVDHILPRSYTKDDSLDNKALVLRDCNAKKTDIYPVPAEFRQVKLWKLLHEKELISKKTFDRLMRTEPLGEGDYEDFINRQKVITDQTAKAVAELLQKKYPTSQIVYSKAKNVVDFKNKFGLYKCRETNNLHHARDAYLNIVVGNVYHTCFSTPMAMFYKKDDGWRENNLKTMFTRNVKGAWDENSLQLVKSTFGKHTMAVSQYAFCYNGMFYDQTVYPKGDPGITSPRKGSGALADVEKYGGYKSQKTSYFAIVQSKGKKGQTIKTIEAVPVLTAYRQRTNPDALLDYFKTYLTEPTILIPKLKVRQLVSYNGTPVYIAGITGDYIIAHNANELFTDNKTDEYVNQLSKLVEMAKNGTISEENGEYIIKTNRNKDVKLTINRQSNIELYETLKNKLSKPSYQGLSPFSTFRKNLESGEEKFANLSVADQCTVLLQILKFFKCNAETADIVLIGGSGRSGCILFNKDVSKADFKIICKSPAGLTERIKKV

SEQ ID NO: 138 - protein, 1420 aa, synthetic construct
  REGION 1..1420: note = MG44-138 effector
MSNYDNFKKYGDYYIGLDVGTGSCGWAVTDKSYNILKVSGKSLWGVRLFPTADTAAERRAHRCARRRVFRTRQRLNLLEQLFDPEISKVDVGFFQRLKNSEFKEISKNNLFGDNSYKDKDFFKEYPTIYHLRYKLMNEPVDDIRLLFLAVHHIIKHRGHFLFERLDVNNIGASLPELWEQCCSQFVDISLFSNVSDDFQEIADSLKQNLIDMRDDVINVIRTSSDKRSDLKKVFAQLKSVYDEISDPEVKKSTENKVNRWYLLLLGYKVSAAEIFTIEESDEEGLSCKIKFNSSDYDEQIQKINDEFKGVVESEKAVYDVIKLQEILKDCNSISESKVELFNKHAEELRIFKSLLRERLSENLLAEVNKKVNVAKNEKLTTEPKSFYKEIFEERNKNTEKGKICFYYDITHGDKSANKEAIKGSSIYKRLQILAQILLCSSEINKLSEKEKVILHRIGDLSIFETQVSADNSVIPYQINLAELDKILKVQSKNFAFLSEKDDAGVSVYDKIKALLTFRIPYYVGPLNNHSKFSWIVKKSQEKIVPWNFESVVDTEKSAEAFIKRMTSKCTYLSGEDVLPKNSIIYSKFMVLNVLNNIRINGMRLDEAQTGLTKKVFDELYCNQINVTQKQLVAYLYNNGFLTSKEELTGFDDEQKVSMSSYVKIKNALGTDNFDINFAESFIKYSTLFPNDYLMIEKRLKREFSSECAKFNENLSKLCRIKFSGWGRLSEKLLTGLLGHNKNSEFDKNSILGFMLNGKGNLMELLSSEYTFSDLISSENSILDKNDAFSYQNLVEGLYVSPSVKRMIWQTLLVVREITKKIMGYEPSRIFVEMARGATADQKGKRTNSRKKSILALYDKCRKDFDISEIYSSLEKQDDNKLLSDKIYLYYTQLGKSMYTGNKIEFEDLLNNSKQYDIDHIIPQSLTKDDSIDNRVLVERTVNEVKDNNYPLSYQIRENQTQFWKHLLDLGLISKSKFERLIRSTSLSNSEKEGFIARQLVETRQSTKAIAGLLSKLYKKAKIIYPKAGLTADFKQKFDLIKVRELNDLHHAKDAYCNIVVGNVYFEKFTSKYQYVIANNERYSFSTSDTSYIFTNQNEKRLQQSGIWDSRNGCSISVVRKNYYRNNILKTIKQEEVKGKLFDLTLYGPSKATIKKKKHLGCEYGGYDKDYNTFFSFISFISKKKKIYRFIGIPLRIVENSNNIHDSIVQYLLDEKFENPQILIEKLPFPFILKNNETGFLYKVSSYEKANKRITLQQFNSLILSIRSQKILKAIESFERKVKLNDKKVNFVYDEKKSGFSEQDLTNLFSELKSKVENTFFNCLPAVITNVLKNIDLQTYRVKEKDSDERLLTVEQKVHVVVELLKAFQSNGASSDLHDIGESKNSGIVRTTELDFEKYSIINYSVTGFYFIETKLRDLIK

SEQ ID NO: 139 - protein, 1347 aa, synthetic construct
  REGION 1..1347: note = MG44-139 effector
MEKEQKFYLGLDIGTNSVGIACTDENYNLLRVKGKDCWAVRLFDEAQTAADRRTARTARRRLQRRRYRINQLQGLFAPFMQDNLFFLRLNNSQFFADDKAGELDGDVNNLFADSGFTDRNFHEKYPTIYHLRFALQQSPVDDIRLYYLALHHIIKYRGHFLYDGNISEVRDVHKLFDTLNTVCENTFAENTPHFDIEKADEAKDMLLRSKGKLKETVKSIKQLFSVQNDDCGKIRTEIINGFCGAKFSPEKLLGDAYSEEKSFAFRDVEEDAFEAMQSTYGDDFVLLKAMREIYNFVTFERLFNGQPNISSAMIAVYDKHKSDLKKLKGFIKKNYDSDGGKKCREMFSDVTQKANYVNYVGHVGYGKSRKRVKTCDYDSFIAYVKKFLMDGNFAHDETYDEIMAEIEAKTFLPKILHSDNGLVPHQVNEDELVKIVAQMVRAFPETAQMASKILPLFLFRIPYYVGPLVGSNSWAVRKSDEKITPWNFRDVVDEAASNEEFMRRMTNKCTYLHGVDVLPKCSIAYQKFNTLNQINKLKVNDCAISVPLKQKIFAELFLVKPRVSDKMIASLIVREGAVAPGDSVVLSGKDGGDIKASMSSYIQLKRILGDFVDYDLASGGNVCENIILWHTLNTDKRLVEDLIVKNYGDNPAVAPYVKQLKGLVFNDFGKLSGRLLTELDVVDKQTGELCTVTDLLWNTNENFNELMFDKRYNLEEVIAAENNDDDGKVDYEDVQKLYVSPAVRRGIWQSLQMVDEYVAALGKEPDKVFVEVSREEGVKGDKGRTHSRKKQLLEKYKNINPKDVENIDELTGELNSDKISDMRLRQERLYLYFRQLGRCMYSGEPIDLDHINDSKLYDVDHILPRSYIKDDSLDNKVLVLRSKNAEKSDTYPLPLGFTNQQGWWKMLRVKDLISSGTYDRLMRTAPLTDDDYNDFINRQKVITDQTSKAVIELLKRKYPGATLVYSKAVNVADFKSKFDLYKCRETNDLHHARDAYLNVVVGNVYSTVFGVRIETYVKDGEKWKTYNLKKMFTRDVPGAWNENSIRTVKGVYNSSSMCVTRYAYCNKGAFYKQTVYSGNENITAPRKGKGPLANMERYGGYMTQSTAYFAIVESQGKKGRIKIIEAVPVMVDYQSRNDPDRVVRYFEENGLVDVKLIVPKIKIKQLVSYNGSRVYLAGVGDVRILVHNATELFVDNKIDDYVNQLLKIVEMAKQPTFNKNSDCYIVKTNRMGDIKLVVDKESNVKLYDELILKLECKRFQGFSAYTSFRNVLTESREKFVGLSTLEQAIVLLEVLKFFKNNADTADLSLIGESKRAGILRFSKNITDVDFRIISQSPCGLTVHVKRV

SEQ ID NO: 140 - protein, 1337 aa, synthetic construct
  REGION 1..1337: note = MG44-140 effector
MEKFYIGTDIGTNSAGVACTDENYNLLRVKGKDCWAVRLFDEGKTAVDRRTFRTGRRRLQRRKQRIAWLQDLFAPYMEDETFFIRLNNSQFLPEDKDALLGGDKNTLFAGVYDDKKFHTEFPTVYHLREALMRGGVNDLRLYYLALHHIVKYRGHFLTEGSVDDVRDFGRLLGNLNGVISDVYGDEVPLFSEAAVDEAKNVLLDKTLGIKDRSSKLEKIFGVSDKTSKEIIKGLCGGKISPAVLFGDEYKEEKSVSFKEITDENFEGMRATYGDDFALLEGIRSVYGYVTFEKLLSDHTDLSSAMMDVYDKHKKDLLALKAFIRSERPEDYNRIFKSTDEKYNYVNYIGYTKKGGDKKKVKKCKDDEFYAYIKKYLQGLTDVKDIAARDKFLKDIEAGSFMQKILHSDNGLFPKQINEYELKKILENMVKSCPATAEIKDKIVTLFNYRIPYYVGPLAGKEETCWAVKKSNEKITPWNFDDVIDKAKSNEKFMLRMTNKCSYLRGEDVLPKASIIYQKFDTLNQLNKLRVNDELLTVDLKQKIFNELFLKYPKVSDKKIIDLLVREGKISQNDRSEVTLSGKDGEFKASMSSYIHLKNILGDFVDKDLSENGGVCENIILWHTLNTDKNIVVDLIKENYGKIPEIKNAIKQLKGLVFHDFGRLSRKLLCEIYTVKEDTGELWNVLDALYETNENLNELLNDEKFSFGRNIKEENGEMTSDVGYKDVEELYVSPAVRRGIWQTLTVVDEYVKAIGKAPDKIFVEVTREDGIKGDAGRTQSRKRRLQEKFRTVSDAYADVIAELGEERFTDLKLRQERLFLYFRQLGRCMYTGERIDLNNINDVTRYDVDHILPRTFIKDDSLDNKVLVLRSKNAKKSDTYPLPAGFSNQRDFWKMLLDKGLIAKVTYDRLTRTEPLREDEYQDFINRQKVITDQTVKVVAELFKRRYPTAKIVYSKAKNVNDFKQKFDLFKCRETNDLHHARDAYLNVVVGNVYDTVFTTPMSMYRKDGDVWRTYNLNKLFTRDVKGAWDNAQSIATVKKVYSKNSMVVTRYATCNSGGFYDQTIYGKDEKGITAPRKGKGSLSDSSKYGGYMTQPTAYFAVVSSKDKNGNEIKTIEAVPVLTTYMAKNDPKAVERYFSERLKDAKIIVPKIKGKQLVSYNGTQCYLAGTTGKQILVHNAVQLFTDGKTDEYVNSLLKLADMKAKGIINVGQEEFVMKTNRDGERKLVIDRANNADLYGMLKRKLERENYAGLSAFATFRKNLEKGEEKFNSLTVYEQTVVLLQILKFFKCNAETADISSIGGGKIVGKIYVNINITNVDFRLIDLSPAGLTERVRKV

SEQ ID NO: 141 - protein, 1425 aa, synthetic construct
  REGION 1..1425: note = MG44-141 effector
MSNYDNFKKYGDYYIGLDVGTGSCGWAVTDKSYNILKVSGKSLWGVRLFPTADTAAERRAHRCARRRVFRTRQRLNLLEQLFDPEISKVDVGFFQRLKNSEFKEISKNNLFGDNSYKDKDFFKEYPTIYHLRYKLMNEPVDDIRLLFLAVHHIIKHRGHFLFERLDVNNIGASLPELWEQCCSQFVDISLFSNVSDDFQEIADSLKQNLIDMRDDVINVIRTSSDKRSDLKKVFAQLKSVYDEISDPEVKKSTENKVNRWYLLLLGYKVSAAEIFTIEESDEEGLSCKIKFNSSDYDEQIQKINDEFKGVVESEKAVYDVIKLQEILKDCNSISESKVELFNKHAEELRIFKSLLRERLSENLLAEVNKKVNVAKNEKLTTEPKSFYKEIFEERNKNTEKGKICFYYDITHGDKSANKEAIKGSSIYKRLQILAQILLCSSEINKLSEKEKVLLHRIGDLSIFETQVSADNSVIPYQINLAELDKILKVQSKNFAFLSEKDDAGVSVYDKIKALLTFRIPYYVGPLNNHSKFSWIVKKSQEKIVPWNFESVVDTEKSAEAFIKRMTSKCTYLSREDVLPKNSIIYSKFMVLNVLNNIRINGMRLDEAQTGLTKKVFDELYCNQINVTQKQLVAYLYNNGFLTSKEELTGFDDEPKVSMSSYVKIKNALGTDNFDINFAESFIKYSTLFPNDYLMIEKRLKREFSSECAKFNENLSKLCRIKFSGWGRLSEKLLTGLLGHNKNSEFDKNSILGFMLNGKGNLMELLSSEYTFSDLISSENSTLDKNDAFSYQNLVEGLYVSPSVKRMIWQTLLVVREITKKIMGYEPSRIFVEMARGATADQKGRRTNSRKKSILALYDKCRKDFDISEIYSSLEKQDDNKLLSDKIYLYYTQLGKSMYTGNKIELEDLLNNSKQYDIDHIIPQSLTKDDSIDNRVLVERTVNEVKDNNYPLSYQIRENQTQFWKHLLDLGLISKSKFERLIRSTSLSNSEKEGFIARQLVETRQSTKAIAGLLSKLYKKAKIIYPKAGLTADFKQKFDLIKVRELNDLHHAKDAYCNIVVGNVYFEKFTSKYQYVIANNERYSFSTSDTSYIFTNQNEKRLQQSGTWDSRNGKSISIVKKYYKRNNILMTYKQEERIGALFNQTLYGPEKGTIPKKKNMSCHDYGGYDSDQNSFFSFISYKDDKGNLKTKLIGIPLRVVYGLSDKSSAISHYLLTEKSNEYIDPKVLIDFLPYNFILKDNETGFLARVVSYATKGRQLVLKQFNSLILNEKNNKMLKAIDNFVSRLKNKSFEVKYDKDKSGFTEEDLSSIYSELKDKTKNTVLKALPKTTVKILTDVDINSYQYSENEKSEPKLLSIEQKAVAICEVIKAFHTEPSDLSLLGGKANSGKMCINSVLNLDKDDYSVVFYSITGFYEKELRLSDLLK

SEQ ID NO: 142 - protein, 1334 aa, synthetic construct
  REGION 1..1334: note = MG44-142 effector
MKKFYIGADIGTNSVGVACTDESYRLIRAKSKDCWAVRLFDEGETAFDRRTKRTARRRLARRKQRINWLQELFEPFIDDKTFFIRLNNSQYLPEDKDSLLCGNKNNLFENEGEESKFYKKYPTIYHLRKALMDGGNFDIRLYYLALHHIIKYRGHFLYEGSIEDIRDFSNLMKGLDCAIADSYDGGLNLFDSVDSAKVRDILIDKKSGLRDKQVELEKLLCAKSKREKEILKGITGQKISPYVLFGDEFKEEKSFSLNDMSDEEFESKRSSYGESFTLLDLMHSVCNYVKFEKIFEGHSDISSAMISVYEKHKADLVLLKKVVRKQSKEDYNKIFRSVNEEKNYVNYIGYTSKDGRKIKVKKCKDEDFFKYLKKYLNGILNEDNFDIVSKIIKEIDDRIFLPKILHSDNGLFPKQVNEFELKKIIENMVRNYAETEEMASAVLSLFNYKIPYYVGPLTGCNSWVVRTDEKVTPWNFDRVVDLAKSNEAFMRRMTNKCAYIKGEDVLPKASIIYQKYDTLNQLNKLRINDRVISIELKQTIYNELFLKYPKVTDKKIKELLVREGLCSSSETKDITISGKDGDFKSSMSSYIRLKNILGDFVDDDLKSGGKVCENIILWHTLNTDKKIVEDLIEKNYGFIPEIKANIKQLKGLTFNDFGRLSAKLLIGIEGVDKTTGQILTIMDVLYQTNQNLNEVLNNESYNFSEIIDEENGIETEIISYETVEELYVSPAVRRGIWQTLLMIDEYVNAVGRQPDKIFIEVTRNDGKKGDNGRTQPRKRQLQEKFKNIGSAYSDIIEELSEEKYTDLKLRQERLYLYFRQLGRCMYTGERIILDELNGNRYDVDHILPRTYVKDDSLDNKVLVCRGANATKADTYPLPTEFSRKEVRAHWKMLLDKDLISKTTYDRLTRIEPLKDDDYNDFINRQKTITDQTAKAVIELLKRKYPNAKLIFSRAKNVNDFKNRFNLFKCRETNDLHHARDAYLNVVVGNVFDSVFSTPLGQSRKDGDVWRIYNLKKLFTRDVIGVWSKDSIKIVKDTYSKPSMSVTRYATCNKGKFYDETVCRKNDSAITAPRKGKGPLSDVTKYGGYTTQKTAYFAIVTSVDKKGKSIKTIEAIPVLVTYKLKTDTNAIQKYLESYLREPIIVIPKVKVKQLVSYNGSLCYLAGITNNQITVHNASQLYTDNTTDEYVNELIKIIGMGDNGIITGNESQYITKTNKDGVIRIVVNKENNEKLYETLKNKLDSKIYKGLSAFASFKKNMERGKDKFCELSVLEQAKVLLQILKVFRCNAVNSNIELIGGGRGSGSIKINKNITDVDFKLVNLSPAGLTVRIRKV

SEQ ID NO: 143 - protein, 1425 aa, synthetic construct
  REGION 1..1425: note = MG44-143 effector
MSNYDNFKKYGDYYIGLDVGTGSCGWAVTDKSYNILKVSGKSLWGVRLFPTADTAAERRAHRCARRRVFRTRQRLNLLEQLFDPEISKVDVGFFQRLKNSEFKEISKNNLFGDNSYKDKDFFKEYPTIYHLRYKLMNEPVDDIRLLFLAVHHIIKHRGHFLFERLDVNNIGASLPELWEQCCSQFVDISLFSNVSDDFQEIADSLKQNLIDMRDDVINVIRTSSDKRSDLKKVFAQLKSVYDEISDPEVKKSTENKVNRWYLLLLGYKVSVAEIFTIEESDEEGLSCKIKFNSSDYDEQIQKINDEFKGVVESEKAVYDVIKLQEILKDCNSISESKVELFNKHAEELRIFKSLLRERLSENLLAEVNKKVNVAKNEKLTTEPKSFYKEIFEERNKNTEKGKICFYYDITHGDKSANKEAIKGSSIYKRLQILAQILLCSSEINKLSEKEKVLLHRIGDLSIFETQVSADNSVIPYQINLAELDKILKVQSKNFAFLSEKDDAGVSVYDKIKALLTFRIPYYVGPLNNHSKFSWIVKKSQEKIVPWNFESVVDTEKSAEAFIKRMTSKCTYLSREDVLPKNSIIYSKFMVLNVLNNIRINGMRLDEAQTGLTKKVFDELYCNQINVTQKQLVAYLYNNGFLTSKEELTGFDDEPKVSMSSYVKIKNALGTDNFDINFAESFIKYSTLFPNDYLMIEKRLKREFSSECAKFNENLSKLCRIKFSGWGRLSEKLLTGLLGHNKNSEFDKNSILGFMLNGKGNLMELLSSEYTFSDLISSENSTLDKNDAFSYQNLVEGLYVSPSVKRMIWQTLLVVREITKKIMGYEPSRIFVEMARGATADQKGKRTNSRKKSILALYDKCRKDFDISEIYSSLEKQDDNKLLSDKIYLYYTQLGKSMYTGNKIELEDLLNNSKQYDIDHIIPQSLTKDDSIDNRVLVERTVNEVKDNNYPLSYQIRENQTQFWKHLLDLGLISKSKFERLIRSTSLSNSEKEGFIARQLVETRQSTKAIAGLLSKLYKKAKIIYPKAGLTADFKQKFDLIKVRELNDLHHAKDAYCNIVVGNVYFEKFTSKYQYVIANNERYSFSTSDTSYIFTNQNEKRLQQSGTWDSRNGKSISIVKKYYKRNNILMTYKQEERIGALFNQTLYGPEKGTIPKKKNMSCHDYGGYDSDQNSFFSFISYKDDKGNLKTKLIGIPLRVVYGLSDKSSAISHYLLTEKSNEYIDPKVLIDFLPYNFILKDNETGFLARVVSYATKGRQLVLKQFNSLILNEKNNKMLKAIDNFVSRLKNKSFEVKYDKDKSGFTEEDLSSIYSELKDKTKNTVLKALPKTTVKILTDVDINSYQYSENEKSEPKLLSIEQKAVAICEVIKAFHTEPSDLSLLGGKANSGKMCINSVLNLDKDDYSVVFYSITGFYEKELRLSDLLK

SEQ ID NO: 144 - protein, 1331 aa, synthetic construct
  REGION 1..1331: note = MG44-144 effector
MGADIGTNSVGIACTDENYNLLRIKGKDCWTVRLFDECKTAEERRGFRTSRRRTARRKQRINFLQSLFAPYMNDKTFFIRLNNSQFLPEDKSELLHGDKNTLFSGDYDDKKFHAEFPTIYHLRDKLMSGGIYDLRLYYLALHHIIKYRGHFLFEGSMEDVRDLGKLLNALNDAMVGVYGDELSLFDKSVAEEAKSVLLDDKLKIRDKQIGLEKVFRVDDKIRKEIIKGLCGGKISPSILFGDEYKDEKNFSFKEISDEIFESMRDTYGDDFGLLCAIRSVYGFVTFEKLLEGHSSLSAAMIAVYEKHKNDLKRLKSFIKSERPEDYNKIFKSTEEKCNYVNYVGYTKKGGDKKKVKKCKDDEFYAYLKKYLSGLDDVKDAETRNAIIEEIEDGKFLPKILHSDNGLFPRQINVSELNKIVGNMVKAYPETAAVEEKILTLFRFRIPYYVGPLSGENSWAVRKNDDKITPWNFYDVIDAAKSNEEFMRRMTNKCAYLQGEDVLPKASVLYQKFDTLNQLNKLRVNDEIISVELKKKIYNELFLVYPKVSDKKIKELLVREGRISPSDVNDTVLSGKDGEFKASMSSYIRLKKILGDFVDKDLSENGGVIENIILWHTLNTDKSIVENLIKSNYGKIPEIKNALPQLKGLTFNDFGRLSAKLLSGIYTIIAETGELRNIIDTLYETNENLNEILNDERYEFGRIINEENGQADEEVTYETVKKLYVSPAVRRGIWQAMSVTDEYVRAIGRAPDKIFIEVTRTDGKKGDAGRTQPRKRRLQEKFKALCNDGAFDDIIAELDDEKYTDMRLRQERLYLYFRQLGRCMYTGQRISLDDINDTNLYDVDHILPRTFIKDDSLDNKVLVLRSKNAQKSDTYPLPAGFSDQRGFWKLLLDKGLIEKVTYDRLTRTEPLREDEYRDFINRQKVITDQTVKAVAELMRRKYPTAKIVYSKAKNVSDFRKKFKLFKCRETNDLHHARDAYLNVVVGNVYDTVFSTPMAMFRKDGDVWRNYNLKKLFTREVKFAWNESSIAIVKKTYARPSMTVTRYAMCAKGGFYDQTIYGKGERGITAPRKANGPLSDMSKYGGYKSQSTAYFAIVSSTDKKGNKIKTIEAVPVLTAYQAKTDNKAVEKYFADRLSTPEIIVPKLKIKQLISFNGTPCYLAGITGKQIIVHSAVQLFTDNKTDDYVNSLLNLEDMKSKKAVNVGDDKFVMKTDHTGAEKLVIDKATNIALYRDLMRRLGLKIYSGISAFATFAKNMENGEDKFISLTVCDQATVLLQILKFFKCNAETSDITLIGGSGKSGTVLLNKNITDVDFEIINLSPAGLIERVRKV

SEQ ID NO: 145 - protein, 1202 aa, synthetic construct
  REGION 1..1202: note = MG44-145 effector
MEKFYLGLDIGSNSVGTACTDENYNLLRVKGKDCWSVRLFEESATAEKRRGFRTGRRRNERRKQRIGWLQALFAPFIEDKTFFIRLNNSQFFPEDKDEILGGDKNNLFGGIYDDKAFHAEFPTVYHLRERLITEGRADLRLYYLALHHIIKYRGHFLFDGGLDEVRDLGRLLEELNSVVSDLYDDAPQFDKTKADECKALLLNVSVGAKDKLNSLEKLFGTEDKVGKEILKSFAGFKISPSVLFGEEYKNEKSFSFKDMNDEAFEALRNEYADNFALLEKMRAIYGFVTFEKILAGHSGISSAMIAVYEKHKADLKRLKKFIRSERPDDYSAIFRKTDQKANYVNYIGYTSKGGVKTTVAKCKDEEFYAYLKKYLNGLTSAKDENTLKIILEEVENQTFLPKILHSDNGLFPRQVNQAELVKIVEGMVKFHPETKPVADRILPLFLFRVPYFVGPLTGKNSWVVRKNEKITPWNFDEVVDLAASNEEFMRRMTNKCSYLRGEDVLPKNSVIYQKFDVLNQLNKLKVNDCPVSVEIKKKIFDELFLTFPKVSDKRIKDLLVREGILSFAEAKDATLTGKDGEFKASMSAYVRLKKMLGEFVDKDYAENGGVCENIILWHTLNTDKKIVENLILKNYGNIPVIKENIKQLKGLTFNEFGRLSQKFLTGIRAVDKRTGELVTVIEVLYETNENLNEILFDENYDFGNRIAEENGETSSEVTYADVEDLYVSPSVRRGIWQSLVIADEYVNAIGKTPDKIFIEVTREDGKKGDEGRKVSRKKQLLEKYKTLGEAYADVIAELGDEKYDDFKLRQERLYLYFRQLGRCMYTGERIDLSNLNSDLYDVDHILPRTFIKDDSLDNKVLVLRRANAKKSDAYPLPKEFSDQNGFWKVLLDKRLISRTTYERLTRKDPLSEEDFNYFINRQKTVTDQTVKAVAELMKRKFPDAKIVYSKAKNVSDFKHKFDIFKCRETNDLHHARDAYLNVVVGNVYDTVFSNPLQTYRKDGDLWRDYNLKKMFTRDVKGAWSGETIATVKKVTFKSSMSVTRYALCNKGEFYDQTVYGKDNNGITAPRKGKGPLSDFKKYGGYMSENTAYFAIVYSVGKKGEKIKTIEAVPVLTAYRARVNPGAVEEYLKTYLTAPQILVPKIKIKQLVKYNGVECYLAGVTGNYIVVHNVGYSWGILRVGSFLPTRFTFPRALIRIILR

SEQ ID NO: 146 - protein, 1334 aa, synthetic construct
  REGION 1..1334: note = MG44-146 effector
MKKFYIGADIGTNSVGVACTDESYRLIRAKSKDCWAVRLFDEGETAFDRRTKRTARRRLARRKQRINWLQELFEPFIDDKTFFIRLNNSQYLPEDKDSLLCGNKNNLFENEGEESKFYKKYPTIYHLRKALMDGGNFDIRLYYLALHHIIKYRGHFLYEGSIEDIRDFSNLMKGLDCAIADSYDGGLNLFDSVDSAKVRDILIDKKSGLRDKQVELEKLLCAKSKREKEILKGITGQKISPYVLFGDEFKEEKSFSLNDMSDEEFESKRSSYGESFTLLDLMHSVCNYVKFEKIFEGHSDISSAMISVYEKHKADLVLMKKVVRKQSKEDYNKIFRSVNEEKNYVNYIGYTSKDGRKIKVKKCKDEDFFKYLKKYLNGILNEDNFDIVSKIIKEIDDRIFLPKILHSDNGLFPKQVNEFELKKIIENMVRNYAETEEMASAVLSLFNYKIPYYVGPLTGCNSWVVRTDEKVTPWNFDRVVDLAKSNEAFMRRMTNKCAYIKGEDVLPKASIIYQKYDTLNQLNKLRINDRVISIELKQTIYNELFLKYPKVTDKKIKELLVREGLCSSSETKDITISGKDGDFKSSMSSYIRLKNILGDFVDDDLKSGGKVCENIILWHTLNTDKKIVEDLIEKNYGFIPEIKANIKQLKGLTFNDFGRLSAKLLIGIEGVDKTTGQILTILDVLYQTNQNLNEVLNNESYNFSEIIDEENGIETEIISYETVEELYVSPAVRRGIWQTLLMIDEYVNAVGRQPDKIFIEVTRNDGKKGDNGRTQPRKRQLQEKFKNIGSAYSDIIEELSEEKYTDLKLRQERLYLYFRQLGRCMYTGERIILDELNGNRYDVDHILPRTYVKDDSLDNKVLVCRGANATKADTYPLPTEFSRKEVRAHWKMLLDKDLISKTTYDRLTRIEPLKDDDYNDFINRQKTITDQTAKAVIELLKRKYPNAKLIFSRAKNVNDFKNRFNLFKCRETNDLHHARDAYLNVVVGNVFDSVFSTPLGQSRKDGDVWRIYNLKKLFTRDVIGAWSKDSIKIVKDTYSKPSMSVTRYATCNKGKFYDETVCRKDDSAITAPRKGKGPISDVTKYGGYTSQKTAYFAIVTSVDKKGKRIKTIEAIPVLVTYKLKTDTNAIQKYLESYLREPIIVIPKVKVKQLVSYNGSLCYLAGITNNQITVHNASQLYTDNTTDEYVNELIKIIGMGDNGIITGNESQYITKTNKDGVVRIVVNKENNEKLYETLKNKLDSKIYKGLSAFASFKTNMERGKDKFCELSVLEQAKVLLQILKVFRCNAEISDIQAIGGTAHSGKKLFAKNITDVDFKLVNLSPAGLTVRIRKV

SEQ ID NO: 147 - protein, 1334 aa, synthetic construct
  REGION 1..1334: note = MG44-147 effector
MEKFYLGMDIGTNSVGMACTDENYKLLRAKGKDCWSVRLFDESKTALDRRTYRTSRRRLQRRKYRLALWQERFAPFIDDKNFFIRLNNSQFLPEDKDGALFGDKNNLFNDTALDDKTFHGQFPTIYHLRKALIDGGDYDLRLYYLALHHIIKYRGHFLFEGSMNDIRNINRLFTALNDTLKNVYGDDEAPEFAATSAEKAKEILLDPKKNIRDKEQELEKLFGAESKLEKEIIKGMCGAKISPSVLFGESFKEEKSFSFKELNDETFDAMRQTYGDNFALPEALRAIYSFVTFEKLLVGKPDISSAMIAVYEKHKSDLKLLKDFLRAESGEIYGKVIKNTNEKANYVNYVGYTKKGGDKKKVKTCGYEEFRQYLKKTIAAIDAKDKETQNLILSELENGSFLPKILHSDNGLFPHQVNEDELVKIADNMAKNHPETTDMAKKLRKLFLFRVPYFVGPLAGENSWVVRKTDEKVTPWNFDDVIDKAASNEEFMRRMTNHCSILHAEDVLPKCSMIYQKYNVLNQLNKLKINDCPLPSVELKQKIFNELFLKYNKVSDKKIIDLLVRSGEVSPKEARAITLTGKDGELNASMSSYITFKNILGDFADKPENAEILEKIILWHTLNTDKKIVEDLILKHFGKIPEIKNNVKALKGLVFKDFGRLSEKLLTGLKAADKETGELLSITDILYETNQNLNEILANERYNFAELIKAENGEESDEIGYKDIEELYVSPAVRRGIWQSLIMADEYINAVGKVPDRIFIEFTRTDETKGEAGKKLSRKKQLSDKFKAIKDAEFQDIIAELNSDEITDMKLRQERLYLYFRQLGKCMYSGEQINLSALNDTKTYDVDHILPRSYTKDDSIDNKVLVCRTCNAKKADIYPVPAEFRQVKHWKLLHEKGLISKKTFDRLMRTEPLGEGDYEDFINRQKVITDQTAKAVAELLQKKYPTSQIVYSKAKNVVDFKNKFGLYKCRETNNLHHARDAYLNIVVGNVYHTCFSTPMAMFYKKDDGWRENNLKTMFTRNVKGAWDENSLQLVQSTFEKHTMAVSQYAFCYNGMFYDQTVYPKGDPGITAPRKGSGALADVEKYGGYKSQKTSYFAIVQSKGKKGQTIKTIEAVPVLTAYRQRTNPDALLDYFKTYLTEPTILIPKLKVRQLVSYNGKYFYLAGAKSGQIDTHPASELFTDNETDDYVNQLSKLVEMSQNNMLPNNCEEYLVKTNRNKDKKLIVNKKTNIELYTKLKEKLSDSDKYAITTLSSFYQSIERGLDIFATLSTIDQCKVLLQILKGLKCNGGRADLSLINESKESGRILFSKNITNVDFKIICKSPAGLTERIKKV

SEQ ID NO: 148 - protein, 1356 aa, synthetic construct
  REGION 1..1356: note = MG44-148 effector
MEKEQKFYLGLDIGTNSVGIACTDENYNLLRVKGKDCWAVRLFDEAQTAADRRTARTARRRLQRRRYRINQLQGLFAPFMQDNLFFLRLNNSQFFADDKAGELDGDVNNLFADSGFTDRNFHEKYPTIYHLRFALQQSPVDDIRLYYLALHHIIKYRGHFLYDGNVSEVRDVHKLFDALNTVCENTFAENTPHFDIEKADEAKDMLLRSKGKLKDTVKSIKQLFSVQNDDCGKIRTEIINGFCGAKFSPEKLLGDAYSEEKSFAFRDIEEDAFEAMQSTYGDDFALLKAMREIYNFVTFERLFNGQPNISSAMIAVYDKHKSDMKKLKGFIKKNYDTDGGKKCREMFSDVTQKANYVNYVGHVGYGKSRKRVKTCDYDSFIAYVKKFLMDGNFAHDETYDEIMAEIEAKTFLPKILRSDNGLVPHQVNEDELVKIVAQMVRAFPETAQMANKILPLFLFRIPYYVGPLVGSNSWAVRKSDEKITPWNFRDVVDEAASNEEFMRRMTNKCTYLHGVDVLPKCSIAYQKFNTLNQINKLKVNDCAISVPLKQKIFAELFLVKPRVSDKMIASLIVREGAVAPGDSVVLSGKDGGDIKASMSSYIQLKRILGDFVDYDLASGGNVCENIILWHTLNTDKRLVEDLIVKNYGDNPAVAPYVKQLKGLVFNDFGKLSGRLLTELEVVDKQTGELCTVTDLLWNTNENFNELMFDKRYNLEEVIAAENNDDDGKVDYEDVQKLYVSPAVRRGIWQSLQMVDEYVAALGKEPDKVFVEVSREEGVKGDKGRTHSRKKQLLEKYKNINPKDVENIDELTGELNSDKISDMRLRQERLYLYFRQLGRCMYSGEPIDLDHINDSKLYDVDHILPRSYIKDDSLDNKVLVLRSKNAEKSDTYPLPLGFTNQQGWWKMLRAKDLISSGTYDRLMRTAPLTDDDYNDFINRQKVITDQTSKAVIELLKRKYPGATLVYSKAVNVADFKSKFDLYKCRETNDLHHARDAYLNVVVGNVYSTVFGVRIETYVKDGEKWKTYNLKKMFTRDVPGAWNENSIKTVKGVYNSSSMCVTRYAYCNKGAFYKQTVYSGNENITAPRKGKGPLANMERYGGYMTQSTAYFAIVESQGKKGRIKTIEAVPVMVDYQSRNDPDRVVKYFEENGLVDVKLIVPKIKIKQLVSYNGSWVWLAGMTGNRIIVHNATELFTDNRTDMYVKQFVKLLEMAKNPTFDVNCEKYELTPNRERGEKIIIGRDSNVKLYDFLLKKFDSEDDAKNKINKRFQGISSYLAFGQNLKSGREKFVSLTVLQQVNVLSQVMKFFRCNADTADIELIGGSKGSGKILFNQNITDVDFRIISQSPCGLTVHVKRV

SEQ ID NO: 149 - protein, 1457 aa, synthetic construct
  REGION 1..1457: note = MG44-149 effector
MVNKTNKFRIHLFELVMLLYNYSISQKGKVVKEIMKYFLGLDIGTNSVGWAVTDEKFNVLRKNRKHLWGVRLFEAANTAEKRRAKRSARRGRARKKLMQFWLQQIFAHEIEKVDKDFFIRLKNSAYYADDKDCRLEGGKDSVFRFDIDGKKYTDANYFADYPTIYKLREELLKVPAKDIRYLYLAVYNLIKNRGHFYESGGESENIGFADLLANIKSICEQMDDVEVTFKTDISDAELINVLKNNKYKKDQKTALLELMNCQLQKKHGDNKDKIIVESFISGKIDVNKLFSTDEEKSASCVDLTDIEKFETCVSKLTGLSDDQVLLLEKIKNAYDEIVLKKLIGDCNYVCEAKLKQYNLYKEDLAKLKTFVRKYHKSRYNEIFRSSYTTNNEKTNYALYTQRLVLGGKNVKLGIELQKDGNNYKEIYHDYKKNIESLHKYLKNILESEAEFQDANYETSKKAILDKIADGSFLVKLRNKANASIPNSLLVKELKKILETNATKFEFLKQKDETGLTNAEKIIKIMQFRVPYFVGPVTTKNNSKNVWATIKNNSLTYTPWNLDKIVDFDQSENDFIRRMTNKCTYFKNEDVLPKNSVIFCKYKVLNELNKITVNGVALNDGKEDVDLKRRIFDELFMTKSKVTVLDIKKLLVRSGKYGTEPRMIEIGGIDKDFKSNFAPYITLKNILGDKVNDVTLTEEIIKLLTIMQDKKRVTEKLKKEFPFLTDDELRKIRALNYSGFGTLSKKILNDVRFVDKSTGEVFCGVNDALWHTNQNLQQILHNEKFTLKEEIETIEKRYDEEIEYETVESCYCSPSVKRGIWQSVLVIKELRKHLGEYPQKIFVETTRSDEEKGERGRKLSRLKKLQDTYKSKKDEISKITKNYNELFKELNNKQESELREDKLYLYFLQNGKCAYSGEPLTIEDLSDCDIDHIIPRCFVKDDSLNNRVLVRKRYNNIKSDLYPLPQEWVQNCAHIWKSWLEQGTMSQSKYDKLTRRENLTPEDRAGFINRQLVETSQSVKGLIDILRRFVKNEKNIVFSKAEVVSDFRRWHSIPKCRDANDLHHAIDAYLNIVVGNVTRAKFTDNPVNYFKKKQELGDFIRPIETDDSSDDVEKQTENPLKIFNKYIYDYSTKELIWQGYKDVSRIRDICKRNDISVSKKMEMQTNAAFYLETIHKSRKNNPNTEAKVNLKGKGTLSNIERYGGFGDQTTAYFMIVKSLKSGKDIVTIERMTTYAYAKIKSNLLTLQEYLTGELGLNNPVILKDKLPLYSELALGKGRFLLSGTSGSSLLLHNFNEWYVDFETQKYIKILTKFNSLSNANVTMDISRDKIVVSPAKSKNGKELSLTKEENIQIYKKIADYVNTDMYSVITKGEISKILNEKIEVFSNLEMVEQSKFLYALVTTISNRGNLIWKLDAIGRSGQLTNYRINKNVTGKGYKLVKRNVLGYVIYQQDLENVR

SEQ ID NO: 150 - protein, 1331 aa, synthetic construct
  REGION 1..1331: note = MG44-150 effector
MKKFYIGADIGTNSVGVACTDESYRLIRAKSKDCWAVRLFDEGETAFDRRTKRTARRRLARRKQRINWLQELFEPFIDDKTFFIRLNNSQYLPEDKDSLLCGNKNNLFENEGEESKFYKKYPTIYHLRKALMDGGNFDIRLYYLALHHIIKYRGHFLYEGSIEDIRDFSNLMKGLDCAIADSYDGGLNLFDSAKVRDILIDKKSGLRDKQVELEKLLCVKSKREKEILKGITGQKISPYVLFGDEFKEEKSFSLNDMSDEEFESKRSSYGESFTLLDLMHSVCNYVKFEKIFEGHSDISSAMISVYEKHKADLVLLKKVVRKQSKEDYNKIFRSVNEEKNYVNYIGYTSKDGRKIKVKKCKGEDFFKYLKKYLNGILNEDNFDIVSKIIKEIDDRIFLPKILHSDNGLFPKQVNEFELKKIIENMVRNYAETEEMASAVLSLFNYKIPYYVGPLTGCNSWVVRTDEKVTPWNFDRVVDLAKSNEAFMRRMTNKCAYIKGEDVLPKASIIYQKYDTLNQLNKLRINDRVISIELKQTIYNELFLKYPKVTDKKIKELLVREGLCSSSETKDITISGKDGDFKSSMSSYIRLKNILGDFVDDDLKSGGKVCENIILWHTLNTDKKIVEDLIEKNYGFIPEIKANIKQLKGLTFNDFGRLSAKLLIGIEGVDKTTGQILTILDVLYQTNQNLNEVLNNESYNFSEIIDEENGIETEIISYETVEELYVSPAVRRGIWQTLLMIDEYVNAVGRQPDKIFIEVTRNDGKKGDNGRTQPRKRQLQEKFKNIGSAYSDIIEELSEEKYTDLKLRQERLYLYFRQLGRCMYTCERIILDELNGNRYDVDHILPRTYVKDDSLDNKVLVCRGANATKADTYPLPTEFSRKEVRAHWKMLLDKDLISKTTYDRLTRIEPLKDDDYNDFINRQKTITDQTAKAVIELLKRKYPNAKLIFSRAKNVNDFKNRFNLFKCRETNDLHHARDAYLNVVVGNVFDSVFSTPLGQSRKDGDVWRIYNLKKLFTRDVIGVWSKDSIKIVKDTYSKPSMSVTRYATCNKGKFYDETVCRKNDSAITAPRKGKGPLSDVTKYGGYTTQKTAYFAIVTSVDKKGKSIKTIEAIPVLVTYKLKTDTNAIQKYLESYLREPIIVIPKVKVKQLVSYNGSLCYLAGTTDNRITVHNASQLYTDNTTDEYVNELIKIIGMGDNGIITGNESQYITKTNKDGVIRIVVNKENNEKLYETLKNKLDSKIYKGLSAFASFKTNMERGKDKFCKLSVLEQAKVLLQILKVFRCNAVNSNIELIGGGRGSGSIKINKNITDVDFKLVNLSPAGLTVRIRKV

SEQ ID NO: 151 - protein, 1456 aa, synthetic construct
  REGION 1..1456: note = MG44-151 effector
MVNKTNKFRIHLFELVMLFYNYSISQKGKVVKEIMKYFLGLDIGTNSVGWAVTDEKFNVLRKNRKHLWGVRLFEAANTAEKRRAKRSARRGRARKKLMQFWLQQIFAHEIEKVDKDFFIRLKNSAYYADDKDCRLEGGKDSVFRFDIDGKKYTDANYFADYPTIYKLREELLKVPAKDIRYLYLAVYNLIKNRGHFYESGGESENIGFADLLANIKSICEQMDDVEVTFKTDISDAELINVLKNNKYKKDQKTALLELMNCQLQKKHGDNKDKIIVESFISGKIDVNNLFSLDEEKSACVDLTDIEKFETCVSKLTGLSDDQVPLLEKIKNAYDEIVLKKLIGDCNYVCEAKLKQYNLYKDDLAKLKTFIRKYHKSRYKEIFRSSYTTNNEKINYSLYTQRLVLGGKNVKLGIELQKDGNNYKEIYHDYKKNIESLHKYLKNILESEPEFQDANYETSKKAILDKVTDGSFLVKLRNKANASIPNSLLVKELKKILETNATKFEFLKQKDETGLTNAEKIIKIMQFRVPYFVGPVTAKNNSKNVWATIKNNSLTYTPWNLDKIVDFDQSENDFIRRMTNKCTYFKNEDVLPKNSVIFCKYKVLNELNKITVNGVALNDGKEDVDLKRRIFDELFMTKSKVTVLDIKKLLARSVKYGAEPRSIEIGGIDKDFKSNLAPYITLKNILGDKVNDVTLTEEIIKLLTIMQDKKRVTEKLKKEFPFLTDDELRKIRALNYSGFGTLSKKILNDVRFVDKSTGEVFCGVNDALWHTNQNLQQILHNEKYTLKEEIETIEKQFGEEIEYEAVENCYCSPSVKRGIWQSVLVIKELKKHLGEYPQKIFVETTRSDEEKGEQGRKLSRLKKLQDTYKSKKDEISKIAKNYNELLKELNNKQESELREDKLYLYFLQNGKCAYSGEPLTIEDLSDCDIDHIIPRCFVKDDSLNNRVLVRKRYNNIKSDLYPLPQEWVQNCAHIWKSWLEQGTMSQSKYDKLTRRENLTPEDRAGFINRQLVETSQSVKGLIDILRRFVENEKNIVFSKAEVVSDFRRWHSIPKCRDANDLHHAIDAYLNIVVGNVTRAKFTDNPVNYFKKKQELGDFIRPIETEDSSDDVEKQTENPLKIFNKYIYDYSTKELIWQGYKDVSRIRDICKRNDISVSKKMEMQTNAAFYLETIHKSRKNNPNTEAKVNLKGKGTLSNIERYGGFGDQTTAYFMIVKSLKSGKDIVTIERMTTYAYAKIKSNLLTLQEYLTGELGLNNPVILKDKLPLYSELALGKGRFLLSGTSGSSLLLHNFNEWYVDFETQKYIKILSKFFSLSNANVTMDISRDKIVVSPAKNKNGKELSLTKEENIQIYKKIADYVNTDMYSVITKGEISKILNEKIEVFSNLEMVEQSKFLYGMVTTISNRGNLIWKLDAIGRSGQLTNYRINKNVTGKGYKLVKRNVLGYVIYQQDLENVR

SEQ ID NO: 152 - protein, 1417 aa, synthetic construct
  REGION 1..1417: note = MG44-152 effector
MNKEIYLGLDIGTNSCGYAVTDSNYNLVRIAGHDAWGVRLFEEAQTAKERRINRATRRRIVRKKLQNNWLQELFKSEVEKVDPSFFTRLKFSNLDKEDKEKSDKNLTSKYSLFNDMVEEIFTDKQYYDKYKTVYHLRKSLLTNPAEDIRLLYLAVHSILTHRGHFLYETDFSNNQSNDTLKTDFVSLLEKLKTYGEENFDAKNNLTLTGDKANCVMSLIKDFDDGLPYKQIKENFETELGVKTKLDKTLASILISGKFKTSDIFDVDKEDAIKIDFNDANFEEQYGEIISSLKDVEVEILTLLQAIYANIQLKKLLGENNYICQAMVERYEKHNKQLQKLKKFVKTYFPSKKKIIFNAGHKPSKNGKNEKKENTQYNNYAAYCYSDLCSGKKRVLYKKASQEDFYKFLKSELFECDVENNVELDKYEERKQNILNAIEKNDFLLKLRSNDNILLPNSLYQAELKQILKVSAQKFNFLNNKDADGRSVGQKIIDVVSFRVPYFVGPIGESENGWIRKDKSADFKPWTLDKIIDLDEAENRFIQNMTNKCTYLPTEDVLPQKSLLYSKFRVLNELNNLKINGNAIAVETKQQIFDGLFKKTPKVSTKKLVEFLKQNNIINKNDSNVVFTGIDKEFANDYSSYVTFATKFGEKFVNKNLEVFEKIIKYHTIISDKSRLAKRIKREFNIFSDEDIKFLKSLNFSGWGSLSQKFLEGLKFSDKKSANPEMETLTVMSALWETNKNLQEIIFCKTYDLQQKLDANIQKIQRDLLYDDIQNMYTSPAVKRGTWQAISIINELKNKLGKYPDKIFVEVTRNNQEKGEAGRKDSRHKMVVKKYKDKQLKLDCQKLCIEFNKLMEELNQKDNSNLRSEKLYLYFMQLGKDIYTGKPIDISQLNNDNMYNVDHIIPRCKVKDDSIDNKVLVSAAANLAKSDNYPVDGHIQASQKAFWELLRENGLMTDSKLARLQRTEEFTEKDADNFTNQQLVSTNQESKAVIDLLSKVYSNKRNIIFSKAMFVSDFRKNFNINKSRDVNALHHAQDAYLNVVVGNVLFNRFTEGYWKKNTQENNNQTEDKNANTTSVVEKLFRRTVWSNQTGEVVWKGQQSIDLVRKNCEKNSPCISIMPYENKNGMFYNATVYKSSKNHSATPASFALKAKGPLSSIDKYGGYNSLKNAYFIAVESVGANGSVNKTIETVPIIVEYQHRNDANKTQKIIEYIEKNNNIKITKIIKDKIKYRSLLKIDGGLYMLTAKTEDSLKLLKVNQWFLSNKDIGYIKILEKHQNMPATIKELLKTTDEEIIVSPAVKTNSKQLAISRTNNLYLYDLIIAQLGKKIYSLSSISGLVEKLTTARSVFLSLSISAQAELLLGLVKYVGGAYTVDLTLLGEKKQAGSTRIGKNISNLNISLIEQSVTGLYAKEIVL

SEQ ID NO: 153 - protein, 1135 aa, synthetic construct
  REGION 1..1135: note = MG44-153 effector
MKKFYIGADIGTNSVGVACTDESYRLIRAKSKDCWAVRLFDDGETAADRRTKRTARRRLARRKQRINWLQELFAPFIDDKTFFIRLNNSQYLPEDKDSLLCGNKNNLFENEGGESKFYKKYPTIYHLRKALMDGGNFDIRLYYLALHHIIKYRGHFLYEGSIEDIRDFSNLMKGLKCAISDSYDGELNLFDSVDSAKVRDVLIDKKSGLRDKQVELEKLLCAKSKREKEILKGITGQKISPYVLFGDEFKEEKSFSLNDMSDEEFESKRSSYGESFTLLDLMHSVCNYVKFEKIFEGHSDISSAMISVYEKHKTDLVLLKKVVRKQSKEDYNKIFRSVNEKENYVNYIGYTSKDGRKIKVKKCKDEDFFKYLKKYLNGILNEDNFDIVSKIIKEIDDRIFLPKILHSDNGLFPKQVNEFELKKIIENMVRNYPETEEMASAVLSLFNYKIPYYVGPLTGCNSWVVRTDEKVTPWNFDRVVDLAKSNEAFMRRMTNKCSYIKGEDVLPKASIIYQKYDTLNQLNKLRINDRVISVELKQTIYNELFLKYPKVTDKKIKELLVREGLCSSSETKDITISGKDGDFKSSMSSYIRLKKILGDFVDDDLKSGGKVCENIILWHTLNTDKKIVEDLIEKNYGFIPEIKANIKQLKGLTFNDFGRLSTKLLIGIEGVDKTTGQILTILDVLYQTNQNLNEVLNNESYNFSEIIDEENGIETEIVSYETVEELYVSPAVRRGIWQTLLMIDEYVNAVGRQPDKIFIEVTRNDGKKGDNGRTQPRKRQLQEKFKNIGSAYSDIIEELSEEKYTDLKLRQERLYLYFRQLGRCMYTGERIILDELNGNRYDVDHILPRTYVKDDSLDNKVLVCRGANATKADTYPLPAEFSKKEVRAHWKMLLDKDLISKTTYDRLTRIEPLKEDDYNDFINRQKTITDQTSKAVIELLKRKYPDAKLIFSRAKNVSDFKNRFNLFKCRETNDLHHARDAYLNVVVGNVFDTVFSTPLGQSRKDGDVWRIYNLKKLFTRDVIGAWSKDSIKIVKDTYSKPSMSVTRYATCNKGKFYDETVCRKDDSAITAPRKGEGPLSDVTKYGGYTSQKTAYFAIVTSVDKKGKRIKTIEAIPVLVTYRQIRMRYKNIWNHI

SEQ ID NO: 154 - protein, 1347 aa, synthetic construct
  REGION 1..1347: note = MG44-154 effector
MEKEQKFYLGLDIGTNSVGIACTDENYNLLRVKGKDCWAVRLFDEAQTAADRRAARTARRRLQRRRYRINQLQGLFAPFMQDNLFFLRLNNSQFFADDKAGELDGDVNNLFADSGFTDRNFHEKYPTIYHLRFALQQSPAGDIRLYYLALHHIIKYRGHFLYDGNVSEVRDVHKLFDALNTVCENTFAENTPHFDIEKADEAKDMLLRSKGKLKDTVKSIKQLFSVQNDDCGKIRTEIINGFCGAKFSPEKLLGDAYSEEKSFAFRDVNEDAFEAMQSTYGDDFALLKAMREIYNFVTFERLFNGQPNISSAMIAVYDKHKSDLKKLKGFIKKNYDTDGGKKCRKMFSDVTQKANYVNYVGHVGYGKSRNRVKTCDYDSFIAYVKKFLMDGNFAHDETYDEIMAEIEAKTFLPKILHSDNGLVPHQVNEDELVKIVAQMVRAFPETAQMASKILPLFLFRIPYYVGPLVGSNSWAVRKSDEKITPWNFRDVVDEAASNEEFMRRMTNKCTYLHGVDVLPKCSIAYQKFNTLNQINKLKVNDCAISVPLKQKIFAELFLVKPRVSDKMIASLIVREGAVAPGDSVVLSGKDGGDIKASMSSYIQLKRILGDFVDYDLASGGNVCENIILWHTLNTDKRLVEDLIVKNYGDNPAVAPYVKQLKGLVFNDFGKLSGRLLTELDVVDKQTGELCTVTDLLWNTNENFNELMFDKRYNLEEVIAAENNDDDGKVDYEDVQKLYVSPAVRRGIWQSLQMVDEYVAALGKEPDKVFVEVSREEGVKGDKGRTHSRKKQLLEKYKNINPKDVENIDELTGELNSDKISDMRLRQERLYLYFRQLGRCMYSGEPIDLDHINDSKLYDVDHILPRSYIKDDSLDNKVLVLRSKNAEKSDTYPLPLGFTNQQGWWKMLRAKDLISSGTYDRLMRTAPLTDDDYNDFINRQKVITDQTSKAVIELLKRKYPSATLVYSKAVNVADFKSKFDLYKCRETNDLHHARDAYLNVVVGNVYSTVFGVRIETYVKDGEKWKTYNLKKMFTRDVPGAWNENSIRTVKGVYNSSSMCVTRYAYCNKGAFYKQTVYSGNENITAPRKGKGPLANMERYGGYMTQSTAYFAIVESQGKKGRIKTIEAVPVMVDYQSRNDPDRVVKYFEENGLVGVKLIVPKIKIKQLVSYNGSWVYLAGVGDVRILVHNATELFVDNKIDDYVNQLLKLVEMAKQPTFNKNSDCYIVKTNRMGDIKLVVDKGSNVKLYDELILKLECKQFQGFGAYTSFRNVLTESREKFVGLSTLEQAIVLLEVLKFFKNNADTADLSLIGESKCAGKLRFNKNITDVDFRIISQSPCGLTVHVKRV

SEQ ID NO: 155 - protein, 1331 aa, synthetic construct
  REGION 1..1331: note = MG44-155 effector
MEKFYLGADIGTNSVGIACTDENYKILRARGKDLWCVRLFDEANTAAERRNFRTMRRRLERRRKRIIWLQELFVPYINDATFFIRLNDGGLLAEDKSEPIKGDKNMLFGGEYDDKAFHKQFPTIYHLRKALMDGGGYDLRLYYLALHHIIKYRGHFLFEGGINDIHDLSKLITDLNGATEAVFGEDAFKFDESLSAEAKGVLTDKTKGVKDKQSGLEKIFGAIDKVTKEIIKGICGGKISPSAIFGDEYKEEKSFSFKDLTDETFASMESVYGDDFIVLSAIRAIYNFVTFEKLLSGYEDISSAMIAIYEKHKSDLKKLKTFVKNETPDEYNRIFKSTKESANYVNYIGYTKKGGDKKKVEKCKDEDFYAYVKKYLNSLCDVKNEEARFEMLADIERGEFMPKILHSDGGLFPRQVNEAELAKIAENMVMAHPETAAVKDKLLPLFRYKIPYYVGPLAGKNSWAVRKEGEITPWNFNDKIDLAASNEEFMRRMTNKCSYLRGEDVLPKASMIYQKFDVLNQLNKLKYDGRALSVELKQKIFNELFTKYQKVSDKKIIELLIREGKISPNEKAAALTGKDGDLKASMSSYIRFKKILGDFVDTDEGFTICEKIILWHTLNTDKSVVEDLIKKNYGGVKIIKDNLKVLKGLTFNDFGRLSEKFLTGLIVPDKSTGEMFSILDALYETNENLNELLFDERFDFMGAVKEENGECSEEVTLKDVEELYVSPAVRRGIWQSLTVIDEYVAAIGKSPDKIFVEVTREDGVKGDAGRKLSRKIQLAEKFKGIEQTYSEIAAEFNSDTITDMRLRQERLYLYFRQLGRCMYTGERINLGQINDATLYDVDHILPRTYIKDDSLDNKVLVLRSANAEKSDTYPVPDKFRKQSEFWKMLLDKTLISRTTYDRLMRTAPLTDNDYSDFINRQKVITDQTAKAVAELLERKYPNTKIVYSKAKNVNDFKQEFKIFKCRETNDLHHARDAYLNVVVGNVYDTVFSTPMSMFRQDGDKWRAYNLKNLFKRDAVGAWNVKNSIETVKNTLKKPSMTVTQYAFSNKAYFYKQTVCGKGDSAITAPRKGAGALSDASKYGGYKGQSTAYFAIVSSVGKKGEAVKYIEAVPVLTTYQAKSDDGAVQKYFESYLKNPVILVPKVKIRQLVSFNGTICYLAGSTDNRIIAHNANQLFTDNKTDEYVNALLKIVEMQSKNMLDLYSDSLVIKTNSAGDEKLVVDKDKNLELYQRLTNKLNEKIYSGISAFSTFKNNLLNGEEKFAELELPEQAKVIIQILKFFKCNAETSDLTSIGGAKGSGSIKFNKNITDVDFRLINRSPAGLTEKVHRV

SEQ ID NO: 156 - protein, 1383 aa, synthetic construct
  REGION 1..1383: note = MG44-156 effector
MSNYNNFKKYGDYYIGLDVGTGSCGWAVTDTSYNILKVSGKSLWGVRLFPTADTAAERRSHRCARRRVFRNRQRLNLLEQLFDSEISKVDVGFFQRLKNSEFKEISKNNLFGDCTYNDKDFFKEYPTIYHLRYKLMNEPIDDIRLLFLAVHHIIKHRGHFLFDNVNNIGASLPELWEQCCSQFVDISLFSNLSEDYLDIAESLKQNLIDMRDDVINVIKTSSDKKADLNKVFAQLKSVYDEISDYEVKKTIENRVNKWSLLLLGYKVSAVEIFSIDESDEEGSSCKIQINSSDYDEQLLKIKDEFKGVVESEKAVYDVIKLQEILKGCKSISEAKVKLYNKHAEELRIFKNLLRERLSEKILIEVNKNVKVANNEKLTSDPKSFYKEIFEERNKNTEKGKICFYYDITHGDKSANKEAIKGSSIYKRLQILAQILLCSSKIYKLSEKEKVLLHRIGDLSIFETQVSADNSVIPYQINLAELDKILKVQSKNFAFLSEKDDAGVLVYDKIKALLTFRIPYYVGPLNNHSKFSWIVKKSQEKIVPWNFESVVDTEKSAEAFIKRMTSKCTYLSGEDVLPKNSIIYSKFMVLNVLNNIRINGMRLDEAQTGLTKKVFDELYCNQINVTQKQLVAYLYNNGFLTSKEELTGFDDEQKVSMSSYVKIKNALGTDNFDINFAESFIKYSTLFPNDYLMIEKRLKREFSSECAKFNEKLSKLCRIKFSGWGRLSEKLLIGLIGYNKNSEFDKNSILGFMLNGKGNLMELLSSEYTFSDLISSENSTLDENNAFSYQNLVEGLYVSPSVKRMIWQTLLVVREITKKIMGYEPSRIFVEMARGATADQKGKRTNSRKKSILALYDKCRQDFDISDLSSKLENEKDSKLLSDKIYLYYTQLGKSVYTGKEIKIDEFDLYDIDHIIPQSLTKDDSLDNRVLVEKEINQNDKKNRYPLSSEIQENQKQFWKHLLDLGLISKSKFERLIRSKPLSNSEKEGFIARQLVETRQSTKAIAGLLSKLYKTAKIIYPKAGLTADFKQRFDLIKVRELNDLHHAKDAYCNIVVGNVYYEKFTSNYLYVIENNEPYSFSTSDKSYIFTKQNEKRLRETGTWDSRNGKSISIVKKYYKRNNILMTYKQEERIGALFNQTLYGPEKGTIPKKKNMSCQDYGGYDSDQNSFFSFISYKDDKANLKTKLIGIPLRVVYGLSDKASAISHYLLTEKANEYREPKVLIDFLPFNFILKDNETGFLARVVSFASKGKQLEIKQFNPLVLDEKNLKPLKAIEKFVSRLKNKSIKIKYEKDKSGFTDEDLSSIYSELKDKSKNSVFKNLPKPIVKMLSDVDINNYKYQESEKSEPKLLTIEQKAVAICELIKAFHTESSNLLFLGEKKAQA

SEQ ID NO: 157 - protein, 777 aa, synthetic construct
  REGION 1..777: note = MG44-157 effector
MEEIYLGLDIGTNSCGYAVTDGNYNLVRIGGKDAWGVRLFEKAETAQERRAKRTARRRIVRKKLQNMWLRQLFEKEIEKVDPSFFTRLKYSNLNLEDKILSDKNLTSKYSLFNDTVKQVFTDKEYYSKYKTVYHLRKELLSSPAEDVRLLYLAIHSILTHRGHFLSETDFSSNVPIEDSFNILLEKLGEYSVEFNDGKNVLTIKPDKISGIFLLLEDFSQGLSYRQVKENFEKNLDVKTKLDKTVASILLSGKFKTTDVFAVEKEDAVKVDFNDEKYEEVYGTLAGQLSETELAILNLLKDLYSNIELKKLLGKNNYICEAMVERYKKHNEQLKELKTFVKTYFPSKKNLVFNAQKTSKKEKGEKARKIANYAAYCYSDLKDGKKQIIDGVANRDDFYKFIKSELLECAPEVETDLVKFEEQKQNILNSIEKNDYLLKIRSHDNIVLPNSLYKAELQQILEVNEKKFKFLSEKDEKGKTISEKIVDVICFKIPYFVGPIGQSERGWIRKDKNLDFKPWTLNEIINFDEAEDKFIQNMTSKCTYLPTEDVLPKDSLLYSKFRVLNELNNLKVNGNEISVETKQRIFKGLFEKFKKVSKNKLIEFLKQENIYPKNESIVITGIDNEFANNYSSYVTLINKFGEEFVNKNYDVFEKIIKYHTIISDKLRLEKRIKREFKIFSNEDVKFLKSLNYSGWGKLSGKFLNGIKFTDKKSNNPELESKTIISAMWETNKNLQEVIFCKEYNLLEKLEANIEKIQRDLVYEDVQNMVWELCYFVYN

SEQ ID NO: 158 - protein, 1334 aa, synthetic construct
  REGION 1..1334: note = MG44-158 effector
MKKFYIGADIGTNSVGVACTDESYRLIRAKSKDCWAVRLFDEGETAFDRRTKRTARRRLARRKQRINWLQELFEPFIDDKTFFIRLNNSQYLPEDKDSLLCGNKNNLFENEGEESKFYKKYPTIYHLRKALMDGGNFDIRLYYLALHHIIKYRGHFLYEGSIEDIRDFSNLMKGLDCAIADSYDGGLNLFDSVDSAKVRDILIDKKSGLRDKQVELEKLLCVKSKREKEILKGITGQKISPYVLFGDEFKEEKSFSLNDMSDEEFESKRSSYGESFTLLDLMHSVCNYVKFEKIFEGHSDISSAMISVYEKHKADLVLLKKVVRKQSKEDYNKIFRSVNEEKNYVNYIGYTSKDGRKIKVKKCKDEDFFKYLKKYLNGILNEDNFDIVSKIIKEIDDRIFLPKILHSDNGLFPKQVNEFELKKIIENMVRNYAETEEMASAVLSLFNYKIPYYVGPLTGCNSWVVRTDEKVTPWNFDRVVDLAKSNEAFMRRMTNKCAYIKGEDVLPKASIIYQKYDTLNQLNKLRINDRVISIELKQTIYNELFLKYPKVTDKKIKELLVREGLCSSSETKDITISGKDGDFKSSMSSYIRLKNILGDFVDDDLKSGGKVCENIILWHTLNTDKKIVEDLIEKNYGFIPEIKANIKQLKGLTFNDFGRLSAKLLIGIEGVDKTTGQILTILDVLYQTNQNLNEVLNNESYNFSEIIDEENGIETEIISYETVEELYVSPAVRRGIWQTLLMIDEYVNAVGRQPDKIFIEVTRNDGKKGDNGRTQPRKRQLQEKFKNIGSAYSDIIEELSEEKYTDLKLRQERLYLYFRQLGRCMYTGERIILDELNGNRYDVDHILPRTYVKDDSLDNKVLVCRGANATKADTYPLPTEFSRKEVRAHWKMLLDKDLISKTTYDRLTRIEPLKDDDYNDFINRQKTITDQTAKAVIELLKRKYPNAKLIFSRAKNVNDFKNRFNLFKCRETNDLHHARDAYLNVVVGNVFDSVFSTPLGQSRKDGDVWRIYNLKKLFTRDVIGVWSKDSIKIVKDTYSKPSMSVTRYATCNKGKFYDETVCRKNDSAITAPRKGKGPLSDVTKYGGYTTQKTAYFAIVTSVDKKGKSIKTIEAIPVLVTYKLKTDTNAIQKYLESYLREPIIVIPKVKVKQLVSYNGSLCYLAGTTDNRITVHNASQLYTDNTTDEYVNELIKIIGMGDNGIITGNESQYITKTNKDGVIRIVVNKENNEKLYETLKNKLDSKIYKGLSAFASFKTNMERGKDKFCKLSVLEQAKVLLQILKVFRCNAEISDIQAIGGTAHSGKKLFAKNITDVDFKLVNLSPAGLTVRIRKV

SEQ ID NO: 159 - protein, 1336 aa, synthetic construct
  REGION 1..1336: note = MG44-159 effector
MEKFYIGADIGTNSVGIACTDENYNLLRIKGKDCWTVRLFDECKTAEERRGFRTSRRRTARRKQRINFLQSLFAPYMNDKTFFIRLNNSQFLPEDKSELLHGDKNTLFSGDYDDKKFHAEFPTIYHLRDKLMSGGIYDLRLYYLALHHIIKYRGHFLFEGSMEDVRDLGKLLNALNDAMVGVYGDELSLFDKSVAEEAKSVLLDDKLKIRDKQIGLEKVFRVDDKIRKEIIKGLCGGKISPSILFGDEYKDEKNFSFKEISDEIFESMRDTYGDDFGLLCAIRSVYGFVTFEKLLEGHSSLSAAMIAVYEKHKNDLKRLKSFIKSERPEDYNKIFKSTEEKCNYVNYVGYTKKGGDKKKVKKCKDDEFYAYLKKYLSGLDDVKDAETRNAIIEEIEDGKFLPKILHSDNGLFPRQINESELNKIVGNMVKAYPETAAVEEKILTLFRFRIPYYVGPLSGENSWAVRKSDDKITPWNFYDVIDAAKSNEEFMRRMTNKCAYLQGEDVLPKASVLYQKFDTLNQLNKLRVNDEIISVELKKKIYNELFLVYPKVSDKKIKELLVREGRISPSDVNDTVLSGKDGEFKASMSSYIRLKKILGDFVDKDLSENGGVIENIILWHTLNTDKSIVENLIKSNYGKIPEIKNALPQLKGLTFNDFGRLSAKLLSGIYTIIAETGELRNIIDTLYETNENLNEILNDERYEFGRIINEENGQADEEVTYETVKKLYVSPAVRRGIWQAMSVTDEYVRAIGRAPDKIFIEVTRTDGKKGDAGRTQPRKRRLQEKFKALCNDGAFDDIIAELDDEKYTDMRLRQERLYLYFRQLGRCMYTGQRISLDDINDTNLYDVDHILPRTFIKDDSLDNKVLVLRSKNAQKSDTYPLPAGFSDQRGFWKLLLDKGLIEKVTYDRLTRTEPLREDEYRDFINRQKVITDQTVKAVAELMRRKYPTAKIVYSKAKNVSDFRKKFKLFKCRETNDLHHARDAYLNVVVGNVYDTVFSTPMAMFRKDGDVWRNYNLKKLFTREVKFAWNESSIAIVKKTYARPSMTVTRYAMCAKGGFYDQTIYGKGERGITAPRKANGPLSDMSKYGGYKSQSTAYFAIVSSTDKKGNKIKTIEAVPVLTAYQVNADEKSLLIYFSTYLTNPEILIPKIKSQQLVSFNGTPCYLTGVTGNQIKVKNAVQLFTDNKTDDYVNSLLNLEDMKSKKAVNVGDDKFLMKTDHTGAEKLVIDKATNIALYRDLMRRLGLKIYSGISAFATFAKNMKSGEDKFISLTVCDQATVLLQILKFFKCNAETSDITLIGGSGKSGTVLLNKNITDVDFEIINLSPAGLIERVRKV

SEQ ID NO: 160 - protein, 1422 aa, synthetic construct
  REGION 1..1422: note = MG44-160 effector
MKYYLGLDIGTTSVGWAVTDENMNLLRKKGQDLWGVRLFESADSAADRRLKRSARRNRARKKLMTRWLEELFADEINKVDPNFFLRLHNSALFFDDKDDALGNEKYSLFSMKDKSVNEIDFYKKYPTMYHLREKLLKSPAEDVRLLYLAVHHIIKSRGHFLVESQMGGGSFVETYNSMLELLQEAQLETNLININSADEYLSKLKGWKIREAKEETAKLIGATTVKDKLFANAIIDGKFKLKDLLKDTDIDLTEEEIFEVPLYDQEKYDLVFPLLTANLSEDLVSVIEKLKELHSIVELKKIIKDHDYISQAMVDSYEVHKQDLKQLKKFVREYYPAEYKDLFRMSYVNSNSYLKTNYSIYVGRLMVDGKKFPIGVNLREKKDGIKPAKLDRSIEALYDSIKKLLEKEPTKNDENYQATKASILEKIENGNYLLKQKTKNNVNIPNALLKSELEKILKVNATKYTFLNEKDEYGTTIDKILKIMTFRVPYFVGPISSKPIKEGENRWSEVNNNIAYYPWTINKIVDFNKSEEKFIRRMTNKCTYLTDEDVLPKNSIIFSKFKVLNLRVNGDRLSVANKQRIYDNLFMTKPKVTPKALYNELVAMGYPTDMVIGGIDKEFKSSLSVLLKLKNILSSENFKNEKLLEDIVFYHTLIEDKQRVVNRLKEKYNLSEAELKSIKGLNYSGWGSLSEEFLMNLYFKDLNSNNDLNVMTALWNTNKNLQEIIYCDYYTLREELLARTQKEAKDLVYEDVENLYCSAPVKRSVWQTIKVINELKNLMGEYPEKIFVEVTREDGEKGEKGRKLSRKKNLVKLFASKEAKQAFAQDKEQLQKLLKELNGKEESALRSDKLYLYFLQGGKCAYSGKTINISEIGYDTLDIDHIVPQSYIKDDSIENKVLVYKTYNEAKTDIYPFFNKFDWCKKVQDLWKIWVNAGLMSNRKYEKLTRTAELTPEDRAGFIARQLVETNQSAKVVIDLLRGFVKEDKDIVFSKASVVSAFRQVYDIPKSRDVNDLHHAKDAYLNIVCGNVMRHRFTDNPINFFREKSRRLDEVETNEVGEKIDVNKTTNPIKLFAFPVYSFSSKKKVWNGRSDAYKVANICNKNTCNTSKKTEYNINSGFYDETVYKSKINDPDTKAKVSLKGKGALKDFNKYGGYGSQGTAYFMIVKSTRRGKPTVTMERMTSYALKQIEVGLNTIEDYLKTDLGLDNAEIIVDKLPMYTELNINGGRYLLSTLSGTHLCLHNFNQWFTTKYNNDYSISNNQTEKYIKLIAKYMDMKKAKIEIPAEYITIDKIVISPAKSERGTEKALTRVENVELYNQIINQLKKQMYNNLLAGRDVANKLVERKDIFTNLTVDKQVECLSSIIAGVSTGCKGFDLSLIGGKKSEGEWYISTILTGKTLTIVNRSPLGFVTKIKKLDFSNIQ

SEQ ID NO: 161 - protein, 1347 aa, synthetic construct
  REGION 1..1347: note = MG44-161 effector
MEKEQKFYLGLDIGTNSVGIACTDENYNLLRVKGKDCWAVRLFDEAQTAADRRTARTARRRLQRRRYRINQLQGLFAPFMQDNLFFLRLNNSQFFADDKAGELDGDVNNLFADSGFTDRNFHEKYPTIYHLRFALQQSPAGDIRLYYLALHHIIKYRGHFLYDGNVSEVRDVHKLFDALNTVCENTFAENTPHFDIEKAEEAKDMLLRSKGKLKDTVKSIKQLFSVQNDDCGKIRTEIINGFCGAKFSPEKLLGDAYSEEKSFAFRDVNEDAFEAMQSTYGDDFALLKAMREIYNFVTFERLFNGQPNISSAMIAVYDKHKSDLKKLKGFIKKNYDTDGGKKCREMFSDVTQKANYVNYVGHVGYGKSRKRVKTCDYDSFIAYVKKFLMDGNFAHDETYDEIMAEIEAKTFLPKILHSDNGLVPHQVNEDELVKIVAQMVRAFPETAQMASKILPLFLFRIPYYVGPLVGSNSWAVRKSDEKITPWNFRDVVDEAASNEEFMRRMTNKCTYLHGVDVLPKCSIAYQKFNTLNQINKLKVNDCAISVPLKQKIFAELFLVKPRVSDKMIASLIVREGAVAPGDSVVLSGKDGGDIKASMSSYIQLKRILGDFVDYDLASGGNVCENIILWHTLNTDKRLVEDLIVKNYGDNPAVAPYVKQLKGLVFNDFGKLSGRLLTELDVVDKQTGELCTVTDLLWNTNENFNELMFDKRYNLEEVIAAENEDDNDKVDYREVQKLYVSPAVRRGIWQSLQMVDEYVAALGKEPDKVFVEVSREEGVKGDKGRTHSRKKQLLEKYKNINPKDVENIDELTGELNSDKISDMRLRQERLYLYFRQLGRCMYSGEPIDLDHINDSKLYDVDHILPRSYIKDDSLDNKVLVLRSKNAEKSDAYPLPLGFTNQQGWWKMLRAKDLISSGTYDRLMRTAPLTDDDYNDFINRQKVITDQTSKAVIELLKRKYPGATLVYSKAVNVADFKSKFDLYKCRETNDLHHARDAYLNVVVGNVYSTVFGVRIETYVKDGEKWKTYNLKKMFTRDVPGAWNENSIRTVKGVYNSSSMCVTRYAYCNKGAFYKQTVYYGNENITAPRKGKGPLANMERYGGYMTQSTAYFAIVESQGKKGRIKTIEAVPVMVDYQSRNDPDRVVKYFEENGLVDVKLIVPKIKIKQLVSYNGSRVYLAGVGDVRILVHNATELFVDNKIDDYVNQLLKIVEMAKQPTFNKNSDCYIVKTNRMGDIKLVVDKESNVKLYDELILKLECKRFQGFGAYTSFRNVLTESREKFVDLSTLEQAIVLLEVLKFFKNNADTADLSLIGESKCAGILRFSKNITDVDFRIISQSPCGLTVQVKRV

SEQ ID NO: 162 - protein, 1399 aa, synthetic construct
  REGION 1..1399: note = MG44-162 effector
MSCITLYNRAKQNKQGGDGKKNALPKRKSGSHTAKSGQTKFLFELALLFCKYILPHQKIKVKGKTTMEKFYLGMDIGTNSVGMACTDENYKLLRAKGKDCWSVRLFDESKTALERRTYRTSRRRLQRRKYRLALLQELFAPFIDDKNFFIRLNNSQFLPEDKDGALFGDKNNLFNDPALDDKTFHGQFPTIYHLRKALIDGGDYDLRLYYLALHHIIKYRGHFLFEGSMNDIRNINRLFTALNDTLKNVYGDDEAPEFAATSAEKAKEILLDPKKNIRDKEQELEKLFGAESKLEKEIIKGMCGAKISPSVLFGESFKEEKSFSFKELNDETFDAMRQTYGDNFALPEALRAIYSFVTFEKLLVGKPDISSAMIAVYEKHKSDLKLLKDFLRAESGDIYGKVFKNTNEKANYVNYVGYTKKGGDKKKVKTCGYEEFRQYLKKTIAAIDAKDKETQNLILSELENGSFLPKILHSDNGLFPHQVNEDELVKIADNMAKNHPETTDMAKKLRKLFLFRVPYFVGPLAGENSWAVRKTDEKVTPWNFDDVIDKAASNEEFMRRMTNHCSILHAEDVLPKCSMIYQKYNVLNQLNKLKINDCPLPSVELKQKIFNELFLKYNKVSDKKIIDLLVRSGEVSPEEARAITLTGKDGELNASMSSYITFKNILGDFADKPENAGILEKIILWHTLNTDKKIVEDLILKHFGKIPEIKNNVKALKGLVFKDFGRLSEKLLTGLKAADRETGELLSIIDILYETNQNLNEILANERYNFAELIKAENGEKSDEIGYIDIEELYVSPAVRRGIWQSLIMADEYINAVGKVPDRIFIEFTRTDETKGEAGKKLSRKKQLSDKFKAIKDAEFQDIIAELNSDEITDMKLRQERLYLYFRQLGKCMYSGKNIDLSLLDTDTYDVDHILPRSYTDDDSLNNKVLVCRTCNAKKSNIYPVPAEFRQVKLWKFLHEKGLISKTTFDKLMRTEPLGEGDYEDFSNRQKVITDQTAKAVAELLQKKYSTSQIVYSKAKNVVDFKNKFGLYKCRETNNLHHARDAYLNIVVGNVYHTCFSTPMAMFYKKDDGWRENNLKTMFTRNVKGAWDENSLQLVKSTFGKHTMAVSQYAFCNMGMFYNQTVYPKGDSGITAPRKGKGALADMQKYGGYKKEETSYFVVVQSKGENGQTIKTIEAVPVLTAYKQKSDPNAVFDYFKTYLTEPTILFPKLKTRQLVLYNGTSLYITGTTGDYITANNATELFTNNKTDEYVNQLSKLVEMAKNGTISEENGEYIIKTNRNKDVKLTINRQTNIELYDTLKNKLSKPSYQGLSPFSTFRKNLESGEEKFANLSVTDQCTVLLQILKFFKCNAELANISLIGGGKGSGRILFNKDITNADFKIICKSPAGLTERIKKV

SEQ ID NO: 163 - protein, 1355 aa, synthetic construct
  REGION 1..1355: note = MG44-163 effector
MKKFYLGMDIGTDSVGIAGTDENYNLLRARGKDLWAVRLFDEAKDASARRMKRTARRRLQRRKQRIEWLQELFAPYIEDKCFFLRLNNSGFEKEDKHESLQSQYSLFADAGYTDREFYKKYPTIFHLRRALAERASEEKTDLRLYYLALHHIVKYRGHFLFEGDSISDIRDIKKLFEEFNAVAEDIFPEGDIRLPLEKAEAFRALALSAKGIRDKKKTGEELFETNSPALAELVGLLLGAKAKIGVIFGEEYGEYKEEKLSFKEILDEDFEAKQELYGDNYPLLEAARSIYNYFVFEKILDGNHCISAAMVAVYERHRRDLRLLKNFVKTQFSKEIYYKIFRSEKEAANYCNYISYTKTEKKKIFVKKCKYGDFCKFLKKTLTENRDCVKDKKTLDDILFKIENGDFLPKILNADNGLFPHQINGAELDKILANLCKEYPCFAEKEADGFSVAEKIRKIFLFKIPYYVGPLNNYHEENGNSWVVRKSGKITPWNFEDMVDTASSNEKFIRRMTNKCSYLYGKDVLPKCSMYYQAFDVLNQLNKIKFNEQPISVEMKQELFHSLFLRHRKVTKKLIKEYLTATGKYTSAEAKELSVSGFDGELKANMGAYITLKNCLGDYVDEHPETCENIILWHTLNTDKTIVERQILSHYGDVPVIKEKIKALKGITSFKEFGRLSKELLCELIGGEDPVTREVYTILNRLYHTNFNFNELLFSDTYRFNSAIEAMNAGKDGDVGYDDVKELYVSPMVRRGIWQALTMADEYVQAVGRVPDKIFIEVTRQGDEKKKPTVSRKNQLLENYKGLGQDCRNIDELLTELNDKTDSQLRQERLYLYFKQLGRCAYTGQLIRLEELNGDLYDVDHIMPRSITKDDSLENKVLVRREKNAQKSDEYPLPAGFTDQQRFWKLLRDKGLMSEKKYALLTRTKPLTEDDFRDFINRQLVVTNQTVKAVAELLKRKYGEKGTRIVYSKAKNVDGFKNQYDIVKCRETNDLHHARDAYLNIVVGNVYDTKFTSAYDYYYRKGDAWREYNLKTLFERPVKDAWIGREGIAFVKDVLRKPSMLITRYAYINKGEFYNETIYGKDDKGISAPRKSIEPYNKTEKYGGYKSLTTAYFSVVESKDKKGKLIKTVEAIPVLADYQSKGDREAVLAYLSRMGLREPKLLLPKIKIKSLVSVNGFKVWLAGVTGNRLIIHNAQQWFTDEKTDLYIKNLGKLVEWERTGKIAEEEKARETFSMIKNRKEEVSLLIDRSQNVALYREIVAKLQTKLYRGLSAARSFAEKLSAKEEIFVSLSVLEQAKVLLQIARFMKCNAEAADLSLLKDGAACGILLIGKNITDVDFAVIHQSPCGINTYIQRV

SEQ ID NO: 164 - protein, 1337 aa, synthetic construct
  REGION 1..1337: note = MG44-164 effector
MEKFYIGTDIGTNSAGVACTDENYNLLRVKGKDCWAVRLFDEGKTAVDRRTFRTGRRRLQRRKQRIAWLQDLFAPYMEDETFFIRLNNSQFLPEDKDALLGGDKNTLFAGVYDDKKFHTEFPTVYHLREALMRGGVNDLRLYYLALHHIVKYRGHFLTEGSVDDVRDFGRLLGNLNGVISDVYGDEVPLFSEASSSEVKNILLDKTLGIKDRSTELEKIFGVKDKTSKEIIKGLCGGKISPAVLFGDEYKEEKSFSFKEITDENFEGMRATYGDDFALLEGIRSVYGYVTFEKLLSDHTDLSSAMMDVYDKHKKDLLALKAFIRSERPEDYNKIFKSTDEKYNYVNYIGYTKKGGDKKKVRKCKDDEFYAYIKKYLQGLTDVKDIAARDKFLKDIEAGSFMQKILHSDNGLFPKQINEYELKKILDNMVKSFPATAEIKDKIITLFNYRIPYYVGPLAGKEETCWAVKKSNEKITPWNFDDVIDKAKSNEKFMLRMTNKCSYLRGEDVLPKASIIYQKFDTLNQLNKLRVNDELLTVDLKQKIFNELFLKYPKVSDKKIIDLLVREGKISQNDRSEVTLSGKDGEFKASMSSYIHLKNILGDFVDKDLSENGGVCENIILWHTLNTDKNIVVDLIKENYGKIPEIKNAIKQLKGLVFHDFGRLSRKLLCEIYTVKEDTGELWNVLDALYETNENLNELLNDEKFSFGRNIKEENGEMTSDVGYKDVEELYVSPAVRRGIWQTLTVVDEYVKAIGKAPDKIFVEVTREDGIKGDAGRTQSRKRRLQEKFRTVSDAYADVIAELGEERFTDLKLRQERLFLYFRQLGRCMYTGERIDLNSINDVTRYDVDHILPRTFIKDDSLDNKVLVLRSKNAKKSDTYPLPAGFSNQRDFWKMLLDKGLIAKVTYDRLTRTEPLREDEYQDFINRQKVITDQTVKVVAELFKRKYPTSKIVYSKAKNVNDFKQKFDLFKCRETNDLHHARDAYLNVVVGNVYDTVFTTPMSMYRKDGDVWRTYNLNKLFTRDVKGAWDNAQSIATVKKVYSKNSMVVTRYATCNSGGFYDQTIYGKEEKGITAPRKGKGPLSDSSKYGGYMTQPTAYFAVVSSKDKNGNEVKTIEAVPVLTAYMAKNDPKAVERYFSERLKDAKIIVPKIKGKQLVSYNGTQCYLAGITGKQILVHNAVQLFTDGKIDEYVNSLLKLADMKTKGILNVGQEEFVMKTNRDGERKLVIDRANNADLYGMLKRKLERENYAGLSAFATFRKNLEKGEEKFNSLTVYEQTVVLLQILKFFKCNAETADTTLVGGSAKSGSIKFNNNITNVDFRLIDLSPAGLTERVRKV

SEQ ID NO: 165 - protein, 1336 aa, synthetic construct
  REGION 1..1336: note = MG44-165 effector
MEKFFLGMDIGTNSVGMACTDEKYKLLRAAGRDCWAVRLFDESHTAAERRVARTARRRLERRKQRIGFLQSLFALLIEDKTFFIRLNNSQYSAEDKSAALNGDVNNLFSDDGFKDKDYHKKYPTIFHLRKALMSEPVTDLRLYYLALHHIVKYRGHFLFEGSMAEFHDASKLFEKLNAVCVDLYEERAPLFDTSKVSSAKEILLQRGKDREKRLIEFFAANDGVSKEIIKGICGYKISPQKLFVGRYKEEKSFSAEELSDEAFDALQATFGDDFALLESIRSVCNYITFERLLSGNSDISSAMIALYNKHAADLALLKKYIREHGTQEEYNRFFKFTGENSNYVNYIGYTKKGGDKKKVKICGREEFYRYTKDFLKKLSDDVNEDLERINNEIENKIFLPKILHADNGLFPYQVNEDELKKIIDNMVKNCPQTAGMAKAILPVFLYRIPYYVGPLTGKNSWAVRKEGKENEKVTPWNFKDVIDEAKSNEGFMRKMTGKCSYLYAEDVLPKFSVYYQSYNVLNQLNKLKINDCPISVELKQKIFKELFLTKKKVTDNAIKDLLVRCGKISESEKKSVTISGKDGELNATMSSYIQLKTILGEFVDEDLKNGSGVCENIILWHTLNTEKRIVEYLIMKNYGDTPVIAQNIKALKGLVFKDFGRLSKKFLCDIRAVDKETGELLTVTDILYRTNNNLNELLFSEQYNWQEVIRKENGEITDEITYEDIEKLYVSPAVRRGIWQSLKMADEYVRKIGKTPDKIFVEVTREDGVKGEAGRTISRKKQLQEKYKGIEGIADLTAELNEKTDLDLRSERLYLYFRQLGKCMYSGERIDLSTLSTDRYDVDHILPRTYIKDDGLDNKVLVLRSKNAEKTDVYPIPYGLVTAEARKHWQILLKKRLISDTTYKRLTRTEPLNDDDYGDFINRQKTITDQTAKAVIGLMAKKYPSAKMVYSKAKNVSDFKQKFNLHKCREANDLHHARDAYLNIVVGNVYDTCFATPMAMFNKDGDKWRTYNLKTMFTRTVKGAWEQENNQSLLTVKKTYAKTSMSVTQYAYCFNGEFYDQTIYGKEDTGITAPRKLNGPLSDTSRYGGYKSQNTAYFAVVSSKGKKEKTIKTIEAVPVMVSYKAKNDPNFLQRYFESYLHQPVVLIEKLKKKQLVSYNGTLCYLAGVTGKQIIVHNAVELFTDNKTDEYVNALGKLSDMEKNGRIDTKQEEYVIKTNRLKEVKLTVNRKDNIALYDYLLEKLNNKRYFGVGSFLSYYRTLLKAKEIFDTLSVLKQAATLLQILRFFKCNAETSDLSTIGGPAKSGKITVDKNITETDFSIIHRSACGLTERRQKV

SEQ ID NO: 166 - protein, 1347 aa, synthetic construct
  REGION 1..1347: note = MG44-166 effector
MEKEQKFYLGLDIGTNSVGIACTDENYNLLRVKGKDCWAVRLFDEAQTAADRRAARTARRRLQRRRYRINQLQGLFAPFMQDNLFFLRLNNSQFFADDKAGELDGDVNNLFADSGFTDRNFHEKYPTIYHLRFALQQSLVDDIRLYYLALHHIIKYRGHFLYDGNVSEVRDVHKLFDALNTVCENTFAENTPHFDIEKADEAKDMLLRSKCKLKDTVKNIKQLFSVQNDDCGKIRTEIIHGFCGAKFSPEKLLGDAYSEEKSFAFRDVEEDAFEAMQSTYGDDFALLKAMREIYNFVTFERLFNGQPNISSAMIAVYDKHKSDLKKLKGFIKKNYDTDGGKKCREMFSDVTQKANYVNYVGHVGYGKSRKRVKTCDYDSFIAYVKKFLMDGNFAHDETYDEIMAEIEAKTFLPKILHSDNGLVPHQVNEDELVKIVAQMVRAFPETAQMASKILPLFLFRIPYYVGPLVGSNSWAVRKSDEKITPWNFRDVVDEAASNEEFMRRMTNKCTYLHGVDVLPKCSIAYQKFNTLNQINKLKVNDCAISVPLKQKIFAELFLVKPRVSDKMIASLIVREGAVAPGDSVVLSGKDGGDIKASMSSYIQLKRILGDFVDYDLASGGNVCENIILWHTLNTDKRLVEDLIVKNYGDNPAVAPYVKQLKGLVFNDFGKLSGRLLTELEVVDKQTGELCTVTDLLWNTNENFNELMFDKRYNLEEVIAAENNDDDGKVDYEDVQKLYVSPAVRRGIWQSLQMVDEYVAALGKEPDKVFVEVSREEGVKGDKGRTHSRKKQLLEKYKNINPKDVENIDELTGELNSDKISDMRLRQERLYLYFRQLGRCMYSGEPIDLDHINDSKLYDVDHILPRSYIKDDSLDNKVLVLRSKNAEKSDTYPLPLGFTNQQGWWKMLRAKDLISSGTYDRLMRTAPLTDDDYNDFINRQKVITDQTSKAVIELLKRKYPGATLVYSKAVNVADFKSKFDLYKCRETNDLHHARDAYLNVVVGNVYSTVFGVRIETYVKDGEKWKTYNLKKMFTRDVPGAWNENSIRTVKGVYNSSSMCVTRYAYCNKGAFYKQTVYSGNENITAPRKGKGPLANMERYGGYMTQSTAYFAIVESQGKKGRIKTIEAVPVMVDYQSRNDPDRVVKYFEENGLVDVKLIVPKIKIKQLVSYNGSWVYLAGVGDVRILVHNATELFVDNKIDDYVNQLLKLVEMAKQPTFNKNSDCYIVKTNRMGDIKLVVDKESNVKLYDELILKLECKRFQGFGAYTSFRNVLTESREKFVGLSTLEQAIVLLEVLKFFKNNADTADLSLIGESKCAGKLRFSKNITDVDFRIISQSPCGLTVHVKRV

SEQ ID NO: 167 - protein, 1402 aa, synthetic construct
  REGION 1..1402: note = MG44-167 effector
MENNEKYYVGLDIGTSSVGFCATDEDYNVVNKNGHDLWGVVLFDEAKTAKDRRAKRCARRGVQRQKERLMLLKSLFEEEINKVDSNFFARLKASALWEDDKQSVGIFSRNSLFFDGNLNDKEFFKKYPTIYHLRNACVEKPAEDIRFLYLSIHNMLKHRGNFLSESFNAENLDSEGLNVLFENLQNDIIGDADDGEFGFLSLNSENSLTDDQKEKLKLLDQELSKNHFKVGILAEKLKTIFNCTNQNQIALLKAISGGVVNAKTIFVTKENEFEIDCKIDGFDVADETFEQFVSDVTNFNEQAGAIILSAKAIFDRITFKKILGENTYLCKAMIDKYDLHKKQLAEFKKVIKDLYKEKYAEMFKVSDSKINNYVRYIEGSNYKSTNKGISSKCSRTDFYKYVKTVLESNADACGDERVQNIFRAIEEDNFLPKLRTSANSVIPYQINKHELEKILENAKEKYQFLNNKDEDGLTVAEKIVSILEYRIPYFVGPLSKKNSKNAWIEKRLDEKIFPWNIEQVVDFDKCEMEFIKRMQNNCSYLSGEPVLPKCSLLYCEYMVLQELNNLQINGQKLQRETKEKIYKIFKEKGSITVSTLKNFLIQNGYFSFDEKINVSGLSDNKFASNLNIYKNFNRIFNGEIEKNRSQVEDIIAHATFMSDKNRLEKWLKKSYSNLLNAKQIKEIKGLKIADWGKFSRKFLDGILGIDPRTGESRTIIQIMREEPLNLMEILAKYEFEALNVKKSEKDTIVYDDILQLYCSPAVKRGTWQSVKVVKEIEKIMGRKPAKIFIEVTRADDEKLKGKIIDPRKDKVIKCYKKLKDEIVFGADIKQLKNDLEKAVSLDSKKLYLYFTQMGKCMYTGESININSLIENDCDIDHIFPQSVIKDDSFDNLVLVKRKENIDKSNDIISPTVQNKMKDFWQYLKNNGLISGEKLSRLLRTEELSEAEKKDFVARQIVITNQSAKAVIDLFKTIYGPENVVYSKAKYVSMFRNCEFKFDKEENVEDSDFGKKLKQSLIKCRNMNDLHHAKDAYLNIFVGNVFDEKYSKRYYLKDAFKYGFNLNNAFLKDMPGVLEKEKHLPIVKKTMCSNSPHITFLPREASGQFYKETIYGVVKHQKDYENLEEIKKLEQNDRWNGGNIPLKSSINPLYKTIKYGHFSDGKYSYFTVIEYEKKGKRIIRFVEVPYLFAKNSSNQEDLKNVIAKIIDVKDFKILVEKVKPGTILKIGNGYFKVAGNTGESIKLHNFNQLFLPDEMNQYFKLFSKTVKLMNDKKELNIEDGNIVVAQNRFGEKSLLTKEENMKLYKELIKHLNKSIYKCISLGKIGKDLKNTYEIFENIDIVEQVKTIKGLLDIINGVSGGDITNVGGSKNSGLISFSKTLSKNPVSIINSSPTGFYQKEFKLV

SEQ ID NO: 168 - protein, 1334 aa, synthetic construct
  REGION 1..1334: note = MG44-168 effector
MKKFYIGADIGTNSVGVACTDESYRLIRAKSKDCWAVRLFDEGETAFDRRTKRTARRRLARRKQRINWLQELFEPFIDDKTFFIRLNNSQYLPEDKDSLLCGNKNNLFENEGEESKFYKKYPTIYHLRKALMDGGNFDIRLYYLALHHIIKYRGHFLYEGSIEDIRDFSNLMKGLDCAIADSYDGGLNLFDSVDSAKVRDILIDKKSGLRDKQVELEKLLCVKSKREKEILKGITGQKISPYVLFGDEFKEEKSFSLNDMSDEEFESKRSSYGESFTLLDLMHSVCNYVKFEKIFEGHSDISSAMISVYEKHKADLVLLKKVVRKQSKEDYNKIFRSVNEEKNYVNYIGYTSKDGRKIKVKKCKGEDFFKYLKKYLNGILNEDNFDIVSKIIKEIDDRIFLPKILHSDNGLFPKQVNEFELKKIIENMVRNYAETEEMASAVLSLFNYKIPYYVGPLTGCNSWVVRTDEKVTPWNFDRVVDLAKSNEAFMRRMTNKCAYIKGEDVLPKASIIYQKYDTLNQLNKLRINDRVISTELKQTIYNELFLKYPKVTDKKIKELLVREGLCSSSETKDITISGKDGDFKSSMSSYIRLKNILGDFVDDDLKSGGKVCENIILWHTLNTDKKIVEDLIEKNYGFIPEIKANIKQLKGLTFNDFGRLSAKLLIGIEGVDKTTGQILTILDVLYQTNQNLNEVLNNESYNFSEIIDEENGIETEIISYETVEELYVSPAVRRGIWQTLLMIDEYVNAVGRQPDKIFIEVTRNDGKKGDNGRTQPRKRQLQEKFKNIGSAYSDIIEELSEEKYTDLKLRQERLYLYFRQLGRCMYTGERIILDELNGNRYDVDHILPRTYVKDDSLDNKDLVCRGANATKADTYPLPTEFSRKEVRAHWKMLLDKDLISKTTYDRLTRIEPLKDDDYNDFINRQKTITDQTAKAVIELLKRKYPNAKLIFSRAKNVNDFKNRFNLFKCRETNDLHHARDAYLNVVVGNVFDSVFSTPLGQSRKDGDVWRIYNLKKLFTRDVIGVWSKDSIKIVKDTYSKPSMSVTRYATCNKGKFYDETVCRKNDSAITAPRKGKGPLSDVTKYGGYTTQKTAYFAIVTSVDKKGKSIKTIEAIPVLVTYKLKTDTNAIQKYLESYLREPIIVIPKVKVKQLVSYNGSLCYLAGTTDNRITVHNASQLYTDNTTDEYVNALIKIIGMGDNGIITGNESQYITKTNKDGVIRIVVNKENNEKLYETLKNKLDSKIYKGLSAFASFKTNMERGKDKFCKLSVLEQAKVLLQILKVFRCNAVNSNIELIGGGRGSGSIKINKNITDVDFKLVNLSPAGLTVRIRKV

SEQ ID NO: 169 - protein, 1416 aa, synthetic construct
  REGION 1..1416: note = MG44-169 effector
MEEIYLGLDIGTNSCGYAVTDGNYNLVRIGGKDAWGVRLFEEAETAQERRAKRTARRRVVRKKLQNLWLQQLFEKEIEKIDPSFFTRLKYSNLHLEDKILSDKNLTSKYSLFNDTVKQVFTDKEYYEKYKTVYHLREKLLKNPAEDVRLLYLAIHSILTHRGHFLSETDFSSNVPIEDSFNNLLDKLSAYSVEFNDGKNVLTIKPDKISGIFLLLEDFSQGLSYRQVKENFEKNLDVKTKLDKTVASILLSGKFKTTDVFAVEKEDAVKVDFNDEKFEEVYGTLSSQLSETELAILNLFKDLYSSIQLKKLLGKNDYICEAMVERYDKHNEQLKELKTFVKTYFPSKKNLVFNAQKTSKKKKEEKSGKIANYAAYCYSDLKDGKKQIIDGVASREDFYKFIKNELLECSPEVETDLIKFEEQKQKILNSIEKNDYLLKIRSHDNIVLPNSLYKVELQQILKINEKKFKFLSEKDEKGKTISEKIIDIICFRIPYFVGPIGQSERGWIRKDKNLDFKPWTLNEIINFDEAEDKFIQNMTSKCTYLPTEDVLPKDSLLYSKFRVLNELNNLKVNGNDITVETKQRIFKGLFEKYKKISKNKLIEFLKQENIYPKNESIVITGIDNEFANNYSSYVTLANKFGEEFVNKNYDVFEKIIKYHTIISDKLRLEKRIKREFKIFSNEDVKFLKSLNYSGWGKLSEKFLNGIKFADKKSNSPEFESKTIISAMWETNKNLQEVIFCKDYNLLEKLEANIEKIQRDLVYEDVQNMYTSPSVKRGTWQAISIINELKSKLGKYPDKIFIEVTRNDQEKGDKGRKDSRFGAVVKKYKDKTLKEDCLKEAINYNNLLDELNKRNNSHLRSEKLFLYFMQLGKDAYTGEPIDIAELGNDNAYNVDHIIPRSKVKDDSLDNKVLVSAAANLAKGDEYPLKRKIQFAQKDFWRMLNKNGLMSDKKLARLERTEEFTDKDADDFTNQQLVSTNQESKAVIDLLSKVYDNRRNIVFSKAMFVTEFRNRYNIFKSRDVNDLHHAKDAFLNVVVGNVLFNRFTQGYWKKDKNIKILEDENRVDADKDKNEKATSVVDKVFGRYVWSNQTGEVVWKGWKDVERIQKICYQNSPVISIMPYVNRNGAFYDETIYKKKNDGEKFKAAFALKEKGPMSSIEKYGGFNSVNNAYFMVVESVDNKGRIKKTIECVPIIVEYKYRNDPDKKQKIIKFIEETNNIKITRVIKDELKFRSVLKINGGLYMLTAKTSDSFKVLKLNQWYISNSDTGYIKILEKYKNMPQVAKECLKEDGERLIVSPAVKENSRPQIITRTQNVELYDLIINQLSKKIYDLSSIKAIVSNLKDKRDLFIALSIPNQTEVLLNLVKYVGGGYLADLKLLGGTEHMGTTRISKDITDLNIYLIEQSVTGLYSKGTKL

SEQ ID NO: 170 - protein, 1343 aa, synthetic construct
  REGION 1..1343: note = MG44-170 effector
MEKEQKFYLGLDIGTNSVGIACTDENYNLLRVKGKDCWAVRLFDEAQTAADRRTARTARRRLQRRRYRINQLQGLFAPFMQDNLFFLRLNNSQFFADDKAGELDGDVNNLFADSGFTDRNFHEKYPTIYHLRFALQQSPVDDIRLYYLALHHIIKYRGHFLYDGNVSEVRDVHKLFDALNTVCENTFAENTPHFDIEKADEAKDMLLRSKGKLKDTVKSIKQLFSVQNDDCGKIRTEIINGFCGAKFSPEKLLGDAYSEEKSFAFRDVEEDAFEAMQSTYGDDFALLKAMREIYNFVTFERLFNGQPNISSAMIAVYDKHKSDLKKLKGFIKKNYDTDGGKKCREMFSDVTQKANYVNYVGHVGYGKSRKRVKTCDYDSFIAYVKKFLMDGNFAHDETYDEIMTEIEAKTFLPKILHSDNGLVPHQVNEDELVKIVAQMVLAFPETAQMASKILPLFLFRIPYYVGPLVGSNSWAVRKSDEKITPWNFRDVVDEAASNEEFMRRMTNKCTYLHGVDVLPKCSIAYQKFNTLNQINKLKVNDCAISVPLKQKIFAELFLVKPRVSDKMIASLIVREGAVAPGDSVVLSGKDGGDIKASMSSYIQLKRILGDFVDYDLASGGNVCENIILWHTLNTDKRLVEDLIVKNYGDNPAVAPYVKQLKGLVFNDFGKLSGRLLTELDVVDKQTGELCTVTDLLWNTNENFNELMFDKRYNLEEVIAAENEDDNDEVDYREVQKLYVSPAVRRGIWQSLQMVDEYVAALGKEPDKVFVEVSREEGVKGDKGRTHSRKKQLLEKYKNIDPKDVENIDELTGELNSDKISDMRLRQERLYLYFRQLGRCMYSGEPIDLDHINDSKLYDVDHILPRSYIKDDSLDNKVLVLRSKNAEKSDAYPLPLGFTNQQGWWKMLRAKDLISSGTYDRLMRTAPLTDDDYNDFINRQKVITDQTSKAVIELLKRKYPGATLVYSKAVNVADFKSKFDLYKCRETNDLHHARDAYLNVVVGNVYSTVFGVRIETYVKDGEKWKTYNLKKMFTRDVPGAWNENSIRTVKGVYNSSSMCVTRYAYCNKGAFYKQTVYSGNENITAPRKGKGPLANMERYGGYMTYFAIVESQGKKGRIKTIEAVPVMVDYQSRNDPDRVVEYFEENGLVDVKLIVPKIKIKQLVSYNGSRVWLAGITGPSIIVHNATELFTDNRTDMYVKQFVKLLEMAKNPTFDVNCEKYEFTPNRERGEKITIDRESNIKLYDFFLSKFDCSKFKGVSSYVTFGKNLSIGREKFVALTVSQQVNVLNQIVNFFKCNAETADIELIGGSKISGKILFNKNITDVDFRIISQSPCGLTVHVKRV

SEQ ID NO: 171 - protein, 1334 aa, synthetic construct
  REGION 1..1334: note = MG44-171 effector
MKKFYIGADIGTNSVGVACTDESYRLIRAKSKDCWAVRLFDEGETAFDRRTKRTARRRLARRKQRINWFQELFEPFIDDKTFFIRLNNSQYLPEDKDSLLCGNKNNLFENEGEESKFYKKYPTIYHLRKALMDGGNFDIRLYYLALHHIIKYRGHFLYEGSIEDIRDFSNLMKGLDCAIADSYDGGLNLFDSVDSAKVRDILIDKKSGLRDKQVELEKLLCAKSKREKEILKGITGQKISPYVLFGDEFKEEKSFSLNDMSDEEFESKRSSYGESFTLLDLMHSVCNYVKFEKIFEGHSDISSAMISVYEKHKADLVLLKKVVRKQSKEDYNKIFRSVNEEKNYVNYIGYTSKDGRKIKVKKCKDEDFFKYLKKYLNGILNEDNFDIVSKIIKEIDDRIFLPKILHSDNGLFPKQVNEFELKKIIENMVRNYAETEEMASAVLSLFNYKIPYYVGPLTGCNSWVVRTDEKVTPWNFDRVVDLAKSNEAFMRRMTNKCAYIKGEDVLPKASIIYQKYDTLNQLNKLRINDRVISIELKQTIYNELFLKYPKVTDKKIKELLVREGLCSSSETKDITISGKDGDFKSSMSSYIRLKNILGDFVDDDLKSGGKVCENIILWHTLNTDKKIVEDLIEKNYGFIPEIKANIKQLKGLTFNDFGRLSAKLLIGIEGVDKTTGQILTILDVLYQTNQNLNEVLNNESYNFSEIIDEENGIETEIISYETVEELYVSPAVRRGIWQTLLMIDEYVNAVGRQPDKIFIEVTRNDGKKGDNGRTQPRKRQLQEKFKNIGSAYSDIIEELSEEKYTDLKLRQERLYLYFRQLGRCMYTGERIILDELNGNRYDVDHILPRTYVKDDSLDNKVLVCRGANATKADTYPLPTEFSRKEVRAHWKMLLDKDLISKTTYDRLTRIEPLKDDDYNDFINRQKTITDQTAKAVIELLKRKYPNAKLIFSRAKNVNDFKNRFNLFKCRETNDLHHARDAYLNVVVGNVFDSVFSTPLGQSRKDGDVWRIYNLKKLFTRDVIGVWSKDSIKIVKDTYSKPSMSVTRYATCNKGKFYDETVCRKDDSAITAPRKGKGPLSDVTKYGGYTTQKTAYFAIVTSVDKKGKSIKTIEAIPVLVTYKLKTDTNAIQKYLESYLREPIIVIPKVKVKQLVSYNGSLCYLAGTTDNRITVHNASQLYTDNTTDEYVNELIKIIGMSDNGIITGNESQYITKTNKDGVIRIVVNKENNEKLYETLKNKLDSKIYKGLSAFASFKTNMERGKDKFCELSVLEQAKVLLQILKVFRCNAEISDIQAIGGTAHSGKKLFAKNITDVDFKLVNLSPAGLTVRIRKV

SEQ ID NO: 172 - protein, 1334 aa, synthetic construct
  REGION 1..1334: note = MG44-172 effector
MKKFYIGADIGTNSVGVACTDESYRLIRAKSKDCWAVRLFDEGETAFDRRTKRTARRRLARRKQRINWLQELFEPFIDDKTFFIRLNNSQYLPEDKDSLLCGNKNNLFENEGEESKFYKKYPTIYHLRKVLMAGGNFDIRLYYLALHHIIKYRGHFLYEGSIEDIRDFSNLMKGLDCAIADSYDGGLNLFDSVDSAKVRDILIDKKSGLRDKQVELEKLLCAKSKREKEILKGITGQKISPYVLFGDEFKEEKSFSLNDMSDEEFESKRSSYGESFTLLDLMHSVCNYVKFEKIFEGHSDISSAMISVYEKHKADLVLMKKVVRKQSKEDYNKIFRSVNEEKNYVNYIGYTSKDGRKIKVKKCKDEDFFKYLKKYLNGILNEDNFDIVSKIIKEIDDRIFLPKILHSDNGLFPKQVNEFELKKIIENMVRNYAETEEMASAVLSLFNYKIPYYVGPLTGCNSWVVRTDEKVTPWNFDRVVDLAKSNEAFMRRMTNKCAYIKGEDVLPKASIIYQKYDTLNQLNKLRINDRVISIELKQTIYNELFLKYPKVTDKKIKELLVREGLCSSSETKDITISGKDGDFKSSMSSYIRLKNILGDFVDDDLKSGGKVCENIILWHTLNTDKKIVEDLIEKNYGFIPEIKANIKQLKGLTFNDFGRLSAKLLIGIEGVDKTTGQILTILDVLYQTNQNLNEVLNNESYNFSEIIDEENGRETEIISYETVEELYVSPAVRRGIWQTLLMIDEYVNAVGRQPDKIFIEVTRNDGKKGDNGRTQPRKRQLQEKFKNIGSAYSDIIEELSEEKYTDLKLRQERLYLYFRQLGRCMYTGERIILDELNGNRYDVDHILPRTYVKDDSLDNKVLVCRGANATKADTYPLPTEFSRKEVRAHWKMLLDKDLISKTTYDRLTRIEPLKDDDYNDFINRQKTITDQTAKAVIELLKRKYPNAKLIFSRAKNVNDFKNRFNLFKCRETNDLHHARDAYLNVVVGNVFDTVFSTPLGQSRKDGDVWRIYNLRKLFTRDVIGAWSKDSIKIVKDTYSKPSMSVTRYATCNKGKFYDETVCRKDDSAITAPRKGKGPLSDVTKYGGYTTQKTAYFAIVTSVDKKGKSIKTIEAIPVLVTYKLKTDTNAIQKYLESYLREPIIVIPKVKVKQLVSYNGSLCYLAGITNNQITVHNASQLYTDNTTDEYVNELIKIIGMGDNGIITGNESQYITKTNKDGVIRIVVNKENNEKLYETLKNKLDSKIYKGLSAFASFKKNMERGKDKFCELSVLEQAKVLLQILKVFRCNAEISDIQAIGGTAHSGKKLFAKNITDVDFKLVNLSPAGLTVRIRKV

SEQ ID NO: 173 - protein, 1336 aa, synthetic construct
  REGION 1..1336: note = MG44-173 effector
MEKFFLGMDIGTNSVGMACTDEKYKLLRAAGRDCWAVRLFDESHTAAERRVARTARRRLERRKQRIGFLQSLFALLIEDKTFFIRLNNSQYSAEDKSAALNGDVNNLFSDDGFKDKDYHKKYPTIFHLRKALMSEPVTDLRLYYLALHHIVKYRGHFLFEGSMAEFHDASKLFEKLNAVCVDLYEERAPLFDTSKVSSAKEILLQRGKDREKRLIEFFAANDGVSKEIIKGICGYKISPQKLFVGRYKEEKSFSAEELSDEAFDALQATFGDDFALLESIRSVCNYITFERLLSGNSDISSAMIALYNKHAADLALLKKYIREHGTQEEYNRFFKFTGENSNYVNYIGYTKKGGDKKKVKICGREEFYRYTKDFLKKLSDDVNEDLERINNEIENKIFLPKILHADNGLFPYQVNEDELKKIIDNMVKNCPQTAGMAKAILPVFLYRIPYYVGPLTGKNSWAVRKEGKENEKVTPWNFKDVIDEAKSNEGFMRKMTGKCSYLYAEDVLPKFSVYYQSYNVLNQLNKLKINDCPISVELKQKIFKELFLTKKKVTDNAIKDLLVRCGKISESEKKSVTISGKDGELSVTMSSYIQLKTILGEFADEDLKNGGGVCENIILWHTLNTEKRIVEYLIMKNYGDTPVIAHNIKALKGLVFKDFGRLSKKFLCDIRAVDKETGELLTVTDILYRTNNNLNELLFSEQYNWQEVIRKENGEITDEITYEDIEKLYVSPAVRRGIWQSLKMADEYVRKIGKTPDKIFVEVTREDGVKGEAGRTISRKKQLQEKYKGIEGIADLTAELNEKTDLDLRSERLYLYFRQLGKCMYSGERIDLSTLSTDRYDVDHILPRTYIKDDGLDNKVLVLRSKNAEKTDVYPIPYGLVTAEARKHWQILLKKGLISDTNYKRLTRTEPLNDDDYGDFISRQKTITDQTAKAVIGLMAKKYPSTKMVYSKAKNVSDFKQKFNLHKCRETNDLHHARDAYLNIVVGNVYDTCFATPMAMFNKDGDKWRTYNLKTMFTRTVKGAWEQENNQSLLTVKKTYAKTSMSVTQYAYCFNGEFYDQTIYGKEDTGITAPRKLNGPLSDTSRYGGYKSQNTAYFAVVSSKGKKEKTIKTIEAVPVMVSYKAKNDPNFLQRYFESYLHQPVVLIEKLKKKQLVSYNGTLCYLAGVTGERIIVHNAVELFTDNKTDEYVNALGKLSDMEKNGRIDTQQEEYVIKTNRLKEVKLTVNRKDNIALYDYLLEKLNDKRYFGVGSFLSYYRTLLKAKEIFDTLSVLKQAATLLQILRFFKCNAETSDLSTIGGSNRSGTIRINKDITETEFSIIHRSACGLTERRQKV

SEQ ID NO: 174 - protein, 1425 aa, synthetic construct
  REGION 1..1425: note = MG44-174 effector
MSNYDNFKKYGDYYIGLDVGTGSCGWAVTDKSYNILKVSGKSLWGVRLFPTADTAAERRAHRCARRRVFRTRQRLNLLEQLFDPEISKVDVGFFQRLKNSEFKEIPKNNLFGDNSYKDKDFFKEYPTIYHLRYKLMNEPVDDIRLLFLAVHHIIKHRGHFLFERLDVNNIGASLPELWEQCCSQFVDISLFSNVSDDFQEIADSLKQNLIDMRDDVINVIRTSSDKRSDLKKVFAQLKSVYDEISDPEVKKSTENKVNRWYLLLLGYKVSAAEIFTIEESDEEGLSCKIKFNSSDYDEQIQKINDEFKGVVESEKAVYDVIKLQEILKDCNSISESKVELFNKHAEELRIFKSLLRERLSENLLAEVNKKVNVAKNEKLTTEPKSFYKEIFEERNKNTEKGKICFYYDITHGDKSANKEAIKGSSIYKRLQILAQILLCSSEINKLSEKEKVLLHRIGDLSIFETQVSADNSVIPYQINLAELDKILKVQSKNFAFLSEKDDAGVSVYDKIKALLTFRIPYYVGPLNNHSKFSWIVKKSQEKIVPWNFESVVDTEKSAEAFIKRMTSKCTYLSGEDVLPKNSIIYSKFMVLNVLNNIRINGMRLDEAQTGLTKKVFDELYCNQINVTQKQLVAYLYNNGFLTSKEELTGFDDEPKVSMSSYVKIKNALGTDNFDINFAESFIKYSTLFPNDYLMIEKRLKREFSSECAKFNENLSKLCRIKFSGWGRLSEKLLTGLLGHNKNSEFDKNSILGFMLNGKGNLMELLSSEYTFSDLISSENSTLDKNDAFSYQNLVEGLYVSPSVKRMIWQTLLVVREITKKIMGYEPSRIFVEMARGATADQKGKRTNSRKKSILALYDKCRKDFDISEIYSSLEKQDDNKLLSDKIYLYYTQLGKSMYTGNKIELEDLLNNSKQYDIDHIIPQSLTKDDSIDNRVLVERTVNEVKDNNYPLSYQIRENQTQFWKHLLDLGLISKSKFERLIRSTSLSNSEKEGFIARQLVETRQSTKAIAGLLSKLYKKAKIIYPKAGLTADFKQKFDLIKVRELNDLHHAKDAYCNIVVGNVYFEKFTSKYQYVIANNERYSFSTSDSSYIFTNQNEKRLQQSGTWDSRNGKSISIVKKYYKRNNILMTYKQEERIGALFNQTLYGPEKGTIPKKKNMSCHDYGGYDSDQNSFFSFISYKDDKGNLKTKLIGIPLRVVYGLSDKSSAISHYLLTEKSNEYIDPKVLIDFLPYNFILKDNETGFLARVVSYATKGRQLVLKQFNSLILNEKNNKMLKAIDNFVSRLKNKSFEVKYDKDKSGFTEEDLSSIYSELKDKTKNTVLKALPKTTVKILTDVDINSYQYSENEKSEPKLLSIEQKAVAICEVIKAFHTEPSDLSLLGGKANSGKMCINSVLNLDKDDYSVVFYSITGFYEKELRLSDLLK

SEQ ID NO: 175 - protein, 1334 aa, synthetic construct
  REGION 1..1334: note = MG44-175 effector
MKKFYIGADIGTNSVGVACTDESYRLIRAKSKDCWAVRLFDEGETAFDRRTKRTARRRLARRKQRINWLQELFEPFIDDKTFFIRLNNSQYLPEDKDSLLCGNKNNLFENEGEESKFYKKYPTIYHLRKALMDGGNFDIRLYYLALHHIIKYRGHFLYEGSIEDIRDFSNLMKGLDCAIADSYDGGLNLFDSVDSAKVRDILIDKKSGLRDKQVELEKLLCAKSKREKEILKGITGQKISPYVLFGDEFKEEKSFSLNDMSDEEFESKRSSYGESFTLLDLMHSVCNYVKFEKIFEGHSDISSAMISVYEKHKADLVLLKKVVRKQSKEDYNKIFRSVNEEKNYVNYIGYTSKDGRKIKVKKCKDEDFFKYLKKYLNGILNEDNFDIVSKIIKEIDDRIFLPKILHSDNGLFPKQVNEFELKKIIENMVRNYAETEEMASAVLSLFNYKIPYYVGPLTGCNSWVVRTDEKVTPWNFDRVVDLAKSNEAFMRRMTNKCAYIKGEDVLPKASIIYQKYDTLNQLNKLRINDRVISIELKQTIYNELFLKYPKVTDKKIKELLVREGLCSSSETKDITISGKDGDFKSSMSSYIRLKNILGDFVDDDLKSGGKVCENIILWHTLNTDKKIVEDLIEKNYGFIPEIKANIKQLKGLTFNDFGRLSAKLLIGIEGVDKTTGQILTIMDVLYQTNQNLNEVLNNESYNFSEIIDEENGIETEIISYETVEELYVSPAVRRGIWQTLLMIDEYVNAVGRQPDKIFIEVTRNDGKKGDNGRTQPRKRQLQEKFKNIGSAYSDIIEELSEEKYTDLKLRQERLYLYFRQLGRCMYTGERIILDELNGNRYDVDHILPRTYVKDDSLDNKVLVCRGANATKADTYPLPTEFSRKEVRAHWKMLLDKDLISKTTYDRLTRIEPLKDDDYNDFINRQKTITDQTAKAVIELLKRKYPNAKLIFSRAKNVNDFKNRFNLFKCRETNDLHHARDAYLNVVVGNVFDSVFSTPLGQSRKDGDVWRIYNLKKLFTRDVIGVWSKDSIKIVKDTYSKPSMSVTRYATCNKGKFYDETVCRKNDSAITAPRKGKGPLSDVTKYGGYTTQKTAYFAIVTSVDKKGKSIKTIEAIPVLVTYKLKTDTNAIQKYLESYLREPIIVIPKVKVKQLVSYNGSLCYLAGTTDNRITVHNASQLYTDNTTDEYVNELIKIIGMGDNGIITGNESQYITKTNKDGVIRIVVNKENNEKLYETLKNKLDSKIYKGLSAFASFKTNMERGKDKFCKLSVLEQAKVLLQILKVFRCNAEISDIQAIGGTAHSGKKLFAKNITDVDFKLVNLSPAGLTVRIRKV

SEQ ID NO: 176 - protein, 1369 aa, synthetic construct
  REGION 1..1369: note = MG44-176 effector
MEEKEKAGKFYLGMDVGTNSVGMACTDENYALLRAKGKDAWCVRLFDEAETAASRRTARTARRRVKRRRYRINLLQELFAPFIHDETFFIRLNNSQFFPEDKDEKLGGDKNALFADSGYADKDFHKEFPTIFHLRKALSGGKKKYDPRLYYLALHHIVKYRGHFLYEGEAANVHDIRALIEKLNAALVAVYGDGAVSFDISDNNLADEAKRLLTDDLTPSDKQKKLAIFFKPAAAEDKKIVKAITSGICGLTVSPKDLFGEEYKEEKSFKFSELDEEKFEGMRATYGDDFELLEAIRAIYSFAIFEKLLAGKDGISDAMIGLYDRHKSDLKLLKAFVKKYLPDKYNEVFKSTGIKKADGKTEKINNYVAYVGYTKKGGEKKKVAKCKDEEFRDYVEKILEEAVKSNLEAKAGGDYDYIKQACENGEFMPKILHADNGLFPHQVNGEELGKILSSLQNFYPEVTDEFVKKVKTLFAFRVPYYVGPLAGNGDNHWSVRKADGRILPWNFGDKIDLAASNEAFMRRMTNKCAYLRGEDVLPKASVLYQKYDALNQLNKLRVNDKPVSVELKKRIFDELFTKYPRVTDKKIVDFLVKNGYAANGEKPAISWKDGDFKASMSSYINLKKILGDFVDEDYARGGEVCENIILWHTLNTDKNVVEGLIKRNYGNIPAIRANIKQLKGLTFRDFGRLSKKLLTGLEFADKRTGEIGNLLYFLYERNLNLNEFIFSDEYTLKEKIEEANGGYEVADIDELIEESYVSPAVKRGIRQSLTMADEYVEALGRNPDKVFIEVTREDGQKGDKGRTVSRKRQLSEKYKAITSADFEGIDNVAAELGRDDMTDMRLRREKLYLYFRQLGRCAYSGKPIDLEALNKDGASKRYDVDHILPRTFVKDDGLDNKVLVLRECNALKSDTYPLPNDLRQNSLWKLWLNKGLIGRKTYERLTRTESLGDSDYADFENRQKVITDQTAKAVAGLMKIKFPNSKIVYSKAKNVSDFRQRFDLFKCRETNDLHHARDAYLNIVVGNVYDVRFSGNFRYKDGDAWREYNLKNLFTRDIRGAWNTATSEETVKKTYGKNSMIVTRLAVCGKGGFYNQTVYGSGDGSITQPRKTIGPLSDPSKYGGYKSENTAYFAIVRSTDKKGKRVTTIEAIPVLTSYREKKDTGAVTEYLTKTRGLADLEIVVPKVKVKQLFRYNGTLLYIAGITGKQITAHNATELFTDNKTDEYVRELAKLSAMRKEKKIDETQERYIMKTNALGEEKLVIDRDRNLAFYNLLVEKLGKDRYKGVSAFGVILGYLSKGKDAFMCLSVVNQVQVLLEILKFLRCTADAADLRLLNGSQQSGKIVFNQDITNVKFELVYRSATGLTERVRKI

SEQ ID NO: 177 - protein, 1158 aa, synthetic construct
  REGION 1..1158: note = MG44-177 effector
MGYKVSAVEIFSIDESDEEGSSCKIQINSSDYDEQLLKIKDEFKGVVESEKAVYDVIKLQEILKGCKSISEAKVKLYNKHAEELRIFKNLLRERLSEKILIEVNKNVKVANNEKLTSDPKSFYKEIFEERNKNTEKGKICFYYDITHGDKSANKEAIKGSSIYKRLQILAQILLCSSEIYKLSEKEKVLLHRIGDLSIFETQVSADNSVIPYQINLAELDKILKVQSKNFAFLSEKDDAGVLVYDKIKALLTFRIPYYVGPLNNHSKFSWIVKKSQEKIVPWNFESVVDTEKSAEAFIKRMTSKCTYLSGEDVLPKNSIIYSKFMVLNVLNNIRINGMRLDEAQTGLTKKVFDELYCNQINVTQKQLVAYLYNNGFLTSKEELTGFDDEQKVSMSSYVKIKNALGTDNFDINFAESFIKYSTLFPNDYLMIEKRLKRDFSSECAKFNENLSKLCRIKFSGWGRLSEKLLTGLLGHNKNSEFDKNSILVFMLNGKGNLMELLSSEYTFSDLISSENSTLDKNDAFSYQNLVEGLYVSPSVKRMIWQTLLVVREITKKIMGYEPSRIFVEMARGATADQKGKRTNSRKKSILALYDKCRQDFDISDLSSKLENEKDSKLLSDKIYLYYTQLGKSVYTGKEIKIDEFDLYDIDHIIPQSLTKDDSLDNRVLVEKEINQNDKKNRYPLSSEIQENQKQFWKHLLDLGLISKSKFERLIRSTPLSNSEKEGFIARQLVETRQSTKAIAGLLSKLYKTAKIIYPKAGLTADFKQRFDLIKVRELNDLHHAKDAYCNIVVGNVYYEKFTSNYLYVIENNEPYSFSTSDKSYIFTKQNEKRLQETGTWDSRNGKSISIVKKYYKRNNILMTYKQEERIGALFNQTLYGPEKGTIPKKKNMSCQDYGGYDSDQNSFFSFISYKDDKANLKTKLIGIPLRVVYGLSDKASAISHYLLTEKANEYREPKVLIDFLPFNFILKDNETGFLARVVSFASKGKQLEIKQFNPLVLDEKNLTPLKAIEKFVSRLKNKSIKIKYEKDKSGFTDEDLSSIYSELKDKSKNSVFKNLPKPIVKMLSDVDINNYKYQESEKSEPKLLTIEQKAVAICELIKAFHTESSNLLFLGEKKGSGVKRIKTVLDLEKTDYSILCSSITGFYEKEIRLRDLLK

SEQ ID NO: 178 - protein, 1356 aa, synthetic construct
  REGION 1..1356: note = MG44-178 effector
MEKEQKFYLGLDIGTNSVGIACTDENYNLLRVKGKDCWAVRLFDEAQTAADRRTARTARRRLQRRRYRINQLQGLFAPFMQDNLFFLRLNNSQFFADDKAGELDGDVNNLFADSGFTDRKFHEKYPTIYHLRFALQQSPVDDIRLYYLALHHIIKYRGHFLYDGNVSEVRDVHKLFDALNTVCENTFAENTPHFDIEKADEAKDMLLRSKGKFKDTVKSIKQLFSVQNDDCGKIRTEIINGFCGAKFSPEKLLGDAYSEEKSFAFRDVKEDAFEAMQSTYGDDFALLKAMREIYNFVTFERLFNGQPNISSAMIAVYDKHKSDLKKLKDFIKKNYDTDGGKKCREMFSDVTQKANYVNYVGHVGYGKSRKRVKTCDYDSFIAYVKKFLTDGNFAHDETYDEIMTEIEAKTFLPKILHSDNGLVPHQVNEDELVKIVAQMVRAFPETAQMASKILPLFLFRIPYYVGPLVGSNSWAVRKSDEKITPWNFRDVVDEAASNEEFMRRMTNKCTYLHGVDVLPKCSIAYQKFNTLNQINKLKVNDCAISVSLKQKIFAELFLVKPRVSDKMIASLIVREGAVAPGDSVVLSGKDGGDIKASMSSYIQLKRILGDFVDYDLASGGNVCENIILWHTLNTDKRLVEDLIVKNYGDNPAVAPYVKQLKGLVFNDFGKLSGRLLTELDVVDKQTGELCTVTDLLWNTNENFNELMFDKRYNLEEVIAAENEDDNDKVDYREVQKLYVSPAVRRGIWQSLQMVDEYVAALGKEPDKVFVEVSREEGVKGDKGRTHSRKKQLLEKYKNINPKDVENIDELTGELNSDKISDMRLRQERLYLYFRQLGRCMYSGEPIDLDHINDSKLYDVDHILPRSYIKDDSLDNKVLVLRSKNAEKSDTYPLPLGFTNQQGWWKMLRAKDLISSGTYDRLMRTAPLTDDDYNDFINRQKVITDQTSKAVIELLKRKYPGATLVYSKAVNVADFKSKFDLYKCRETNDLHHARDAYLNVVVGNVYSTVFGVRIETYVKDGEKWKTYNLKKMFTRDVPGAWNENSIRTVKGVYNSSSMCVTRYAYCNKGAFYKQTIYSGAENVTAPRKGKGPLANMERYGGYMTQSTAYFAIVESQGKKGRIKTIEAVPVMVDYQSRNDPDRVVKYFEENGLVDVKLIVPKIKIRQLVSYNGSWVYLASITGNRIGVYNATELFTSNKIDMYVKQFVKLLEMAKNPTFDVSCEKYELTPNRERGEKIIIDRDSNVKLYDFLLKKFDSEGDAKNKINKRFQGISSYLAFGQNLKSGREKFVSLTVLQQVNVLSQVMKFFRCNADTADIELIGGSKGSGKILFNQNITDVDFRIISQSPCGLTVHVKRV

SEQ ID NO: 179 - protein, 1331 aa, synthetic construct
  REGION 1..1331: note = MG44-179 effector
MEKFYLGLDIGSNSVGTACTDENYNLLRVKGKDCWSVRLFEESATAEKRRGFRTGRRRNERRKQRIGWLQALFAPFIEDKTFFIRLNNSQFFPEDKDEILGGDKNNLFGGIYDDKAFHAEFPTVYHLRERLITEGRADLRLYYLALHHIIKYRGHFLFDGGLDEVRDLGRLLEELNSVVSDLYDDAPQFDKTKADECKALLLNVSVGAKDKLNSLEKLFGTEDKVGKEILKSFAGFKISPSVLFGEEYKNEKSFSFKDMNDEAFEALRNEYADNFALLEKMRAIYGFVTFEKILAGHAGISSAMIAVYEKHKADLKRLKKFIRSERPDDYSAIFRKTDQKANYVNYIGYTSKGGVKTTVAKCKDEEFYAYLKKYLNGLTSVKDENTLKIILEEIENQTFLPKILHSDNGLFPRQVNQAELVKIVEGMVKFHQETRPVADLILKLFLFRVPYFVGPLTGKNSWVVRKNEKITPWNFNEVVDLAASNEEFMRRMTNKCSYLRGEDVLPKNSVIYQKFDVLNQLNKLKVNDCPVSVEIKKKIFDELFLVFPKVSDKRIKDLLVREGILSFAEAKDATLTGKDGEFKASMSAYVRLKKMLGEFVDKDYAENGGVCENIILWHTLNTDKKIVENLILKNYGNIPVIKENIKQLKGLTFNEFGRLSQKFLTGIRAVDKRTGELVTVIEVLYETNENLNEILFDENYDFGNRIAEENGETSSEVTYADIEDLYVSPSVRRGIWQSLVIADEYVNAIGKTPDKIFIEVTREDGKKGDEGRKVSRKKQLLEKYKTLGEAYADVIAELGDEKYDDFKLRQERLYLYFRQLGRCMYTGERIDLSNLNSDLYDVDHILPRTFIKDDSLDNKVLVSRRANAKKSDTYPLPKEFSDQNGFWKVLLDKRLISRTTYERLTRKDPLSEEDFNYFINRQKTVTDQTVKAVAELMKRKFPDAKIVYSKAKNVSDFKHKFDIFKCRETNDLHHARDAYLNVVVGNVYDAVFSNPLQTYRKDGDLWRDYNLKKMFTRDVKGAWNGETIATVKKVTFKSSMSVTRYALCNKGEFYNQTVYGKGNKGITAPRKGKGPLSDFKKYGGYMSENTAYFAIVYSVGKKGEKIKTIEAVPVLTAYRARLNPGAVEEYLKTYLTDPQILVPKIKIKQLVKYNGVECYLAGVTGNYIVVHNGVQLFTDNKTDEYVNALLKITDMKAKNMIMSEDESYAVKTNRSGNDKLVVNRDKNVALYRDFKNRLSKPAYKGISAFETFKNNLEKSEDKFISLTVTEQARVLLQILKLFKCNAETVDLSLLGGAGRSGTLLVNKNITNVDFKLINYSPAGLTKKVRTV

SEQ ID NO: 180 - protein, 1336 aa, synthetic construct
  REGION 1..1336: note = MG44-180 effector
MEKFYIGADIGTNSVGIACTDENYNLLRIKGKDCWTVRLFDECKTAEERRGFRTSRRRTARRKQRINFLQSLFAPYMNDKTFFIRLNNSQFLPEDKSELLHGDKNTLFSGDYDDKKFHAEFPTIYHLRDKLMSGGIYDLRLYYLALHHIIKYRGHFLFEGSMEDVRDLGKLLNALNDAMVGVYGDELSLFDKSVAEEAKSVLLDDKLKIRDKQIGLEKVFRVDDKIRKEIIKGLCGGKISPSILFGDEYKDEKNFSFKEISDEIFESMRDTYGDDFGLLCAIRSVYGFVTFEKLLEGHSSLSAAMIAVYEKHKNDLKRLKSFIKSERPEDYNKIFKSTEEKCNYVNYVGYTKKGGDKKKVKKCKDDEFYAYLKKYLSGLDDVKDAETRNAIIEEIEDGKFLPKILHSDNGLFPRQINESELNKIVGNMVKAYPETAAVEEKILTLFRFRIPYYVGPLSGENSWAVRKSDDKITPWNFYDVIDAAKSNEEFMRRMTNKCAYLQGEDVLPKASVLYQKFDTLNQLNKLRVNDEIISVELKKKIYNELFLVYPKVSDKKIKELLVREGRISPSDVNDTVLSGKDGEFKASMSSYIRLKKILGDFVDKDLSENGGVIENIILWHTLNTDKSIVENLIKSNYGKIPEIKNALPQLKGLTFNDFGRLSAKLLSGIYTVIAETGELRNIIDTLYETNENLNEILNDERYEFGRIINEENGQADEEVTYETVKKLYVSPAVRRGIWQAMSVTDEYVRAIGRAPDKIFIEVTRTDGKKGDAGRTQPRKRRLQEKFKALCNDGAFDDIIAELDDEKYTDMRLRQERLYLYFRQLGRCMYTGQRISLDDINDTNLYDVDHILPRTFIKDDSLDNKVLVLRSKNAQKSDTYPLPAGFSDQRGFWKLLLDKGLIEKVTYDRLTRTEPLREDEYRDFINRQKVITDQTVKAVAELMRRKYPTAKIVYSKAKNVSDFRKKFKLFKCRETNDLHHARDAYLNVVVGNVYDTVFSTPMAMFRKDGDVWRNYNLKKLFTREVKFAWNESSIAIVKKTYARPSMTVTRYAMCAKGGFYDQTIYGKGERGITAPRKANGPLSDMSKYGGYKSQSTAYFAIVSSTDKKGNKIKTIEAVPVLTAYQVNADEKSLLIYFSTYLTNPEILIPKIKSQQLVSFNGTPCYLTGVTGNQIKVKNAVQLFTDNKTDDYVNSLLNLEDMKSKKAVNVGDDKFVMKTDHTGAEKLDIDKATNIALYRDLMRRLGLKIYSGISAFATFAKNMKSGEDKFISLTVCDQATVLLQILKFFKCNAEISDITLIGGSGKSGTVLLNKNITDVDFEIINLSPAGLIERVRKV

SEQ ID NO: 181 - protein, 1408 aa, synthetic construct
  REGION 1..1408: note = MG44-181 effector
MSYITLYNRTKQNKLYNRAKQNKRGGDGKKNALPKRKSGSHTAKSGQTKFLFELALLFCKYILTHKKIKVKGKTTMEKFYLGMDIGTNSVGMACTDENYKLLRAKGKDCWSVRLFDESKTALERRTYRTSRRRLQRRKYRLALLQELFAPFIDDKTFFIRLNNSQFLPEDKDGALFGDKNNLFNDPALDDKTFHGQFPTIYHLRKALIDGGDYDLRLYYLALHHIIKYRGHFLFEGSMNDIRNINRLFTALNDTLKNVYGDDEAPEFAATSAEKAKEILLDAKKNIRDKEQELEKLFGAESKLEKEIIKGMCGAKISPSVLFGESFKEEKSFSFKELTDETFDAMRQTYGDNFALPEALRAIYSFVTFEKLLVGKPDISSAMIAVYEKHKSDLKLLKDFLRAESGEIYGKVFKNTNEKANYVNYVGYTKKGGDKKKVKTCGYEEFRQYLKKTIAAIDAKDKETQNLILSELENGSFLPKILHSDNGLFPHQVNEDELVKIANNMAKNHPETTDMAKKLRKLFLFRVPYFVGPLAGENSWAVRKTDEKVTPWNFDDVIDKAASNEEFMRRMTNHCSILHAEDVLPKCSMIYQKYNVLNQLNKLKINDCHLPSVELKQKIFNELFLKYNKVSDKKIIDLLVRSGEVSPEEARAITLTGKDGELNASMSSYITFKNILGDFADKPENAEILEKIILWHTLNTDKKIVEDLILKHFGKIPEIKNNVKALKGLVFKDFGRLSEKLLTGLKAADKETGELLSITDILYETNQNLNEILANERYNFAELIKAENGEESDEIGYKDIEELYVSPAVRRGIWQSLIMADEYINAVGKVPDRIFIEFTRTDETKGEAGKKLSRKKQLSDKFKAIKDAEFQDIIAELNSDEITDMKLRQERLYLYFRQLGKCMYSGKNIDLSSLNTDNYDVDHILPRSYTKDDSLDNKALVLRDCNAKKADHYPVPSELRQVKLWKLLHEKGLISKKTFDRLMRTEPLGEGDYEDFINRQKVITDQTAKAVAELLQKKYPTSQIVYSKAKNVVDFKNKFGLYKCRETNNLHHARDAYLNIVVGNVYHTCFSTPMAMFYKKDDGWRENNLKTMFTRNVKGAWDENSLQLVKSTFEKHTMAVSQYAFCYNGMFYDQTVYPKGDPGITAPRKGSGALTDVEKYGGYKSQKTSYFAIVQSKGKKGQTIKTIEAVPVLTAYRQRTNPDTLLDYFKTYLTEPTILIPKLKVRQLVSYNEKRLYLAGAKSGQIDTHPASELFTDNETDDYVNQLSKLVEMSQNNMLPNNCEEYLVKTNRNKDKKLIVNKKTNMELYIKLKEKLSDSDKYAITTLSSFYQSIERGSDIFATLSTIDQCKVLLQILKGLKCNGGRADLSLINESKESGRILFSKNITNADFKIICKSPAGLTERIKKV

SEQ ID NO: 182 - protein, 1417 aa, synthetic construct
  REGION 1..1417: note = MG44-182 effector
MNKEIYLGLDIGTNSCGYAVTDSNYNLVRIAGHDAWGVRLFEEAQTAKERRINRATRRRIVRKKLQNNWLQELFKSEVEKVDPSFFTRLKFSNLDKEDKEKSDKNLTSKYSLFNDMVEEIFTDKQYYDKYKTVYHLRKSLLTIPAEDIRLLYLAVHSILTHRGHFLYETDFSNNQSNDTLKADFVSLLEKLKTYGEENFDAKNNLTLTGDKANCVMSLIKDFDNGLPYKQIKENFETELGVKTKLDKTLASILISGKFKTSDIFDVDKEDAIKIDFNDANFEEQYGEIISSLKDVEVEILTLLQAIYANIQLKKLLGENNYICQAMVERYEKHNKQLQELKKFVKTYFPSKKKIIFNAGHKPSKNGKNEKKENTQYNNYAAYCYSDLCSGKKRVLYKKASQEDFYRFLKSELFECDVENNVELDKYEERKQNILNAIEKNDFLLKLRSNDNILLPNSLYQAELKQILKVSAQKFNFLNNKDADGRSVGQKIIDVVSFRVPYFVGPIGESENGWIRKDKSADFKPWTLDKIIDLDEAENRFIQNMTNKCTYLPTEDVLPQKSLLYSKFRVLNELNNLKINGNAIAVETKQQIFDGLFKKTPKVSTKKLVEFLKQNNIINKNDSNVVFTGIDKEFANDYSSYVTFATKFGEKFVNKNLEIFEKIIKYHTIISDKSRLAKRIKREFNIFSDEDIKFLKSLNFSGWGSLSQKFLEGLKFSDKKSANPEMETLTIMSVLWKTNKNLQEIIFCKTYDLQQKLDANIQKIQRDLLYDDIQNMYTSPAVKRGTWQAISIINELKNKLGKYPDKIFVEVTRNNQEKGEAGRKDSRHKMVVKKYKDKQLKLDCQKLCIEFNKLMEELNQKDNSNLRSEKLYLYFMQLGKDIYTGKPIDISQLNNDNMYNVDHIIPRCKVKDDSIDNKVLVSAAANLAKSDNYPIDGHIQASQKAFWELLRENGLMTDSKLARLQRTEEFTEKDADNFTNQQLVSTNQESKAVIDLLSKVYSNKRNIIFSKAMFVSDFRKNFNINKSRDVNALHHAQDAYLNVVVGNVLFNRFTEGYWKKNTQENNNQTADKNANTTSVVEKLFRRTVWSNQTGEVVWKGQPSIDLVRKNCEKNSPCISIMPYENKNGMFYNATVYKSSKNHSATPASFALKAKGPLSSIDKYGGYNSLKNAYFIAVESVGANGTVNKTIETVPIIVEYQHRNDANKTQKIIEYIEKTNNIKITKVIKDKIKYRSLLKIDGGLYMLTAKTEDSLKLLKVNQWFLSNKDIGYIKILEKHQNMPATIKELLKTTDEEIIVSPAVKTNSKQLAINRTNNLYLYDLIIAQLGKKIYSLSSISGLVEKLTTARSVFLSLSISAQAELLLGLVKYVGGAYTVDLTLLGEKKQAGSTRIGKNISNLNISLIEQSVTGLYAKEIVL

SEQ ID NO: 183 - protein, 1347 aa, synthetic construct
  REGION 1..1347: note = MG44-183 effector
MEKEQKFYLGLDIGTNSVGIACTDENYNLLRVKGKDCWAVRLFDEAQTAADRRTARTARRRLQRRRYRINQLQGLFAPFMQDNLFFLRLNNSQFFADDKAGELDGDVNNLFADSGFTDRNFHEKYPTIYHLRFALQQSPVDDIRLYYLALHHIIKYRGHFLYDGNVREVRDVHKLFDALNTVCENTFAENTPHFDIEKADEAKNMLLRSKGKLKDTVKSIKQLFSVQNDDCGKIRTEIINGFCGAKFSPEKLLGDAYSEEKSFAFRDIEEDAFEAMQSTYGDDFALLKAMREIYNFVTFERLFNGQPNISSAMIAVYDKHKSDMKKLKGFIKKNYDTDGGKKCREMFSDVTQKANYVNYVGHVGYGKSRKRVKTCDYDSFIAYVKKFLIDGNFAHDETYDEIMAEIEAKTFLPKILHSDNGLVPHQVNEDELVKIVAQMVRAFPETAQMASKILPLFLFRIPYYVGPLVGSNSWAVRKSDEKITPWNFRDVVDEAASNEEFMRRMTNKCTYLHGVDVLPKCSIAYQKFNTLNQINKLKVNDCAISVPLKQKIFAELFLVKPRVSDKMIASLIVREGAVAPGDSVVLSGKDGGDIKASMSSYIQLKRILGDFVDYDLASGGNVCENIILWHTLNTDKRLVEDLIVKNYGDNPAVAPYVKQLKGLVFNDFGKLSGRLLTELDVVDKQTGELCTVTDLLWNTNENFNELMFDKRYNLEEVIAAENNDDDGKVDYEDVRKLYVSPAVRRGIWQSLQMVDEYVAALGKEPDKVFVEVSREEGVKGDKGRTHSRKKQLLEKYKNINPKDVENIDELTGELNSDKISDMRLRQERLYLYFRQLGRCMYSGEPIDLDHINDSKLYDVDHILPRSYIKDDSLDNKVLVLRSKNAEKSDTYPLPLGFTIQQGRRKMLRAKDLISSGTYDRLMRTAPLTDDDYNDFINRQKVITDQTSKAVIELLKRKYPGATLVYSKAVNVADFKSKFDLYKCRETNDLHHARDAYLNVVVGNVYSTVFGVRIETYVKDGEKWKTYNLKKMFTRDVPGAWNENSIRTVKGVYNSSSMCVTRYAYCNKGAFYKQTVYSGNENITAPRKGKGPLANMERYGGYMTQSTAYFAIVESQGKKGRIKTIEAVPVMVDYQSRNDPDRVVKYFEENGLVDVKLIVPRMKVRQLISYNGSCVYLASATGSQIGAYNAMELFTDNRTDMYVKQFVKLLEMAKNPTFDVNCEKYEFTPNRERGEKITIDRNSNIKLYDFLLLKFENKKFRGISSYLSFERNLYSGREKFIELTVLQQVWILSQIKQFFKCNDKSADIELIGGSKGSGKIVFGKNITDVDFRIISQSPCGLTVHVKRV

SEQ ID NO: 184 - protein, 1337 aa, synthetic construct
  REGION 1..1337: note = MG44-184 effector
MEKFYIGTDIGTNSAGVACTDENYNLLRAKGKDCWAVRLFDEGKTAVDRRTFRTGRRRLQRRKQRIAWLQDLFAPYMEDETFFIRLNNSQFLPEDKDALLGGDKNTLFAGVYDDKKFHTEFPTVYHLREALMRGGVNDLRLYYLALHHIVKYRGHFLTEGSIDDVRDFGRLLGNLNGVISDVYGDEVPLFSEAAVDEAKNVLLDKTLGIKDRSTELEKIFGVKDKTSKEIIKGLCGGKISPAVLFGDEYKEEKSFSFKEITDDNFESMRGTYGDNFTVLEVIRSIYGYVIIENLLSGHDDLSSAMIAVYDKHKKDLLALKAFIRSERPEDYNKIFKSTDEKYNYVNYIGYTKKGGDKKKVKKCKDDEFYAYIKKYLQGLTDVKDIAARDKFLKDIEAGSFMQKILHSDNGLFPKQINEYELKKILENMVKSFPATAEIKDKIVTLFNYRIPYYVGPLAGKEETCWAVKKSNEKITPWNFDDVIDKAKSNEKFMLRMTNKCSYLRGEDVLPKASIIYQKFDTLNQLNKLRVNDELLTVDLKQKIFNELFLKYPKVSDKKIIDLLVREGKISQNDRSEVTLSGKDGEFKASMSSYIHLKNILGDFVDKDLSENGGVCENIILWHTLNTDKNIVVDLIKENYGKIPEIKNAIKQLKGLVFHDFGRLSRKLLCEIYTVKEDTGELWNVLDALYETNENLNELLNDEKFSFGRNIKEENGEMTSDVGYKDVEELYVSPAVRRGIWQTLTVVDEYVKAIGKAPDKIFVEVTREDGIKGDAGRTQSRKRRLQEKFRTVSDAYADVIAELGEERFTDLKLRQERLFLYFRQLGRCMYTGERIDLNSINDITRYDVDHILPRTFIKDDSLDNKVLVLRSKNAKKSDTYPLPAGFSNQRDFWKMLLDKGLIAKVTYDRLTRTEPLREDEYQDFINRQKVITDQTVKVVAELFKRRYPTAKIVYSKAKNVNDFKQKFDLFKCRETNDLHHARDAYLNVVVGNVYDTVFTTPMSMYRKDGDVWRTYNLNKLFTRDVKGAWDNAQSIATVKKVYSKNSMVVTRYATCNNGGFYNATVYSKDEKGITAPRKGKGSLSDSSKYGGYMTQPTAYFAVVSSKDKNGNEIKTIEAVPVLTTYMAKNDPKAVERYFSERLKDAKIIVPKIKGKQLVSYNGTQCYLAGTTGKQILVHNAVQLFTDGKTDEYVNSLLKLADMKARGVINVGQEEFVMKTNRDGERKLVIDRANNADLYGMLKRKLERENYAGLSAFATFRKNLEKGEEKFNSLTVYEQTVVLLQILKFFKCNAETADISSIGGGKIVGKIYVNINITNVDFRLIDLSPAGLTERVRKV

SEQ ID NO: 185 - protein, 1334 aa, synthetic construct
  REGION 1..1334: note = MG44-185 effector
MEKFYLGTDIGTNSVGIACTDENYELIRAKGKDCWAVRLFDESKTAETRRNFRTSRRRLERRKQRISWLQALFAPYINDETFFIRLNNSQFLPEDKDEILQADKNALFGDDGYTDKDYHAEFPTIYHLREKLIEGGKYDLKLYYLAIHHIVKYRGHFLFEGATMEEIRDIKRLFENLNAVWEATYAENVPHINLSKSDEAKEILLDTKKGLRDKQIALEKLFGENTALMKESIKAMLGGKTSPETLFGEEYKDEKSFSFKDMDEEAFEALQSTYGDNFECLNALRSIYNFVAFEKLLCGHKNISSAMIAVYNKHAADLSLLKSFIRSERPNDYNKIFKSTTEKANYVNYIGYTKKGGEKKKVVKCKSDDEFFAYMKKYLSSLDDIKDGATRDKILGEIENGSFLPKILHSDKGLFPRQVNEAELKAIASNMVKYYPETKEIADKIIPLFEYRIPYFVGPLAGVNSWAVRKSGEITPWNIGEKIDLAASNEEFMRKMTSKCSYIFGEDVLPKCSIIYQKFDVLNQLNKLRVNDRPLTVDLKKGIFNELFLKYPKVSDKKIKDYLIRNGHFSPTDGEITLSGKDGEFKASMSSYIQLKRVLGDFVDKDLKNGGEVCENIILWHTLNTDKKIVYDLIEKRYKNIPEIADSVKALKGLSFKNFGRLSKKFLVDLYSADNETGELVNILDVLYETNENLNEILNDEKYAFGKLVDEANGVADSKITYEDIEKLYVSPAVRRGIWQTVTMIDEYVEAIGRTPDKIFVEVTREDGVKGDAGRTQPRKRQLQEKYKNVSKTYADVISELGDEKYSDMKLRQERLFLYFRQLGRCMYSGQRIDLDRLDTDTYDVDHILPRTFIKDDSLDNKVLVLRSKNAEKADRYPLPQGFSGQQDFWKMLLDKKLIAKTTYDRLTRTEPLGDNDYKDFINRQKVITDQTVKAVAELMKRKYPTAKIVYSKAKNVNDFKNKFDIFKCRETNDLHHARDAYLNVVVGNVYDTVFSNPLDMFRKDGDMWRTYNLKKLFTRDVKGAWDCSRIARIKSICGSHTMAVTRYAYCNKGEFYNQTVYGKDDAGVSSPRKSNGPLSDTKKYGGYKSQTTAYFAIVSSLDKKGNRVKTIEAVPVLVAYRLKNNPKAVEEYFNSYLKSPEILIPKIKNKQLVSYNGTLIYIASITGNQIGVHLATELFTDNRTDEYVNGLLKLLDMDAKKMLLGDEPRYVIKTNRNKEEKLVIDKEKNVELYGYLKNKLCDKIYSGLSAFATFAKNIENGKEKFIDLTIVEQAKVLIQILMMFKRKDTLSDLTLIGGSSLSGKIRIGKKIDGVNFEIIHLSPAGLRVIKNKV

SEQ ID NO: 186 - protein, 1466 aa, synthetic construct
  REGION 1..1466: note = MG44-186 effector
MAKQSDKNLEKFGEYYIGLDVGSGSCGWAVTDEDYNIVKIAGKHLWGSRLFAPGNTAEDRRVFRANRRRLQRRAWRISLLNELFNTELAKKDPSFLIRLKESELNGDDPNKTIKNRFFLFDDQNFTDKDYLKNYPTIYHLRNKLLTDGVDDIRLLYLGIHHIIKHRGHFLYQLGTNELLDKIKNATFAWDNACESVASCLLKDTEESPAKEDLKLALIDLLKANDFEALVAKGITEKKQNIDDAFKSLATFEKENSADLPPDYKSLKKETMNLIKGNVADCTKLFGIEDLDEPIKIKFYADDFDANFDKLSDEQQGHVENIKAFYDLVKVKDLLGENSYLSQAKVKLYNEHQQDLKIFKSLIKEKLTQERLTAAGYKGTLQEFKKDIFLDEKDVDKSVKIARNNPDDKACNGSFYYNLTHGQRASYLEPSDKFKKGKAYSIYKVLTTLAKNWLSDEASGLSKEEKLLLSKLDNLTLLPTCTTKENCLLPYQLNEIELNKILEIAENKFTFLKVKGNDGLSVSDKIKSLLTFRIPYFVGPLNEHSKFAWIKRKEDGSITPWNFENKVDLSESAEKFIKRMTCKCTYLFEKDVLPKNSPIYCKFMALDILNNLHLKGRRLNTLQHGLVKEIFYDVCCKRKITKLNHIKKYLTDRGLLTDNDLLEGMDEDQSINMSSWIDFTNLLSTLKIDNLTPTSDFCEKVVFYSTVFGANQKLLKERLKEEFKDLSNKYPALIDKACKLKYSGWGSLSKELLVDIKGMSKLQPTDPDNILNYMEQGFGNLMELLSKNFTFSDAIKNINRKSRNSVNIFSYENLVKDLYCSPSVKKMIWQTLLVVKEITEDIMGYPPKRIFVETTRGNLESKKGQKTQSRYDFLNEIYKDILNNKDKCAICKEHDIDIKALSNELVSVSNASLSKNNNKLYYYYLQLGKCMYSGEDINLNDLSDDSLVDIEHIYPRAKGGQDDFSNKVLVKKIKNASKSDNSLSSAVVQKMKPFWQHLQKLGLLSNINDKYGTKKLATLCKAGNLSEMEQEGFIARQLVDTSQATKELVHLLEDLYGPNNTKVVSNKANMIFKFKSYYGLRKVRELNNLHHAKDAYCNIVAGNIYYTTFNSFNFSRVDEVFSTVSLDPTDKEKPYIFNYYLSKDKKEQIRKIYYRNDILLTEKTEETTGTFYDQTLYAKKAELESKKKNLPSELYGGYKSLKGAFDCLVKVTTKKTEYVKLISIPILYKNKVKEYLDKNLSCEKQFVSYQVLIEKIKGPYLLSNDSKGCIYRISGHSNGYLLSGQYHSLVLNENLTKTLSKIYQYSNKKKEDNNAQVNCFDAEINSLFKSIGERTLCAPLCNLDIQYQKIFDIFRSLPIEKLKLTLELKADLIVELIKIFQNKTVTVNTKLLSDYCDKASVSSDDICVLKEFIEFYQKEKKSKLSKYAGKCNISENLPIKDNWSIINRSVTGFYESAVSINELFKRK

SEQ ID NO: 187 - protein, 1380 aa, synthetic construct
  REGION 1..1380: note = MG44-187 effector
MDNKKWYLGLDIGTNSVGFCATDTEYNILTKNSKLQCGSRLFEDAKDASERRLYRSSRRRMARKKERINLLQQFFDQAISSVDPAFFIRLKESNYHLEDKSTGTASKYPLFNDPDFTDIEYFKKYPTIYHLRCALMNDDITDPRLLYLACHHLIKYRGHFLFEQFNSDSDADLIGLVDAINDDLNGIFSEENETNDILLSTENVSQIYEIINDKKVSDKDQWFSIFQILNPTANKIVKKICDTLKGSKIDLKSIAPSLEVDDDLKESLKDFRFGSEQFDDTYSLLEQYLDDQHLSLLMHLKQFYDFISLNRILSGFSTVAAAMVDRYNLHHEQLLAFKRFVKKYKPEFYNSFFRKNFVYDRKKDSNGTYQNYVKSNKSNGKKVLAYSALCIEKKQQGHIPVIATYETFLSYTKKFIDTCEKNIPEIINDEDFKIIKSGLESDNFCKKHNLKENSYIPYQLTLKELDLILNRQRKNFSFLTDDVVDKIKRILTFKIPYYVGPLSEKDKGTFSWIVKKPGHEKQKVLPWNFDDIVDRAASGEEFIKRMTSKCTYLRNEDVLPKQSLLYQKYLVLNELNNVSIDNNKIDQNIKKAIFEELCCKGIKLSKTKIENFLRDKHLISKENHVTYNGSFNESLSSFDKLKNILGDKFNDTMCEDIILWHTVFANEKDPVKSRIIEKYGQELNPSLIDKLSRLAFTGWGRLSRRFLAELGTTDVRTGETALSILHLLEDTNLNLMQILNSDNYSPSFINLVNQENTLDTSETLNYDYVKNLYCSPTVKRSIWQAIRISKELTQINGCDPEKIFIEVTRTNDLKNKGKVTDSRRKQLQDKFNKTKKIKDDLSQLLDEFNKRTDLREFRGDRLYLYFMQLGRCMYSGEKINLDELYDRNLYDIDHIYPQSIILDDSLDNKVLVKRHINAVKSDNYPLSSDIRNSQRAFWDMLKKYDFISETKYNRLISSKELTSDIIGGFLNRQLVSTNIAVKETAKALSQIYPGNNRIVYSKAGHVSDFRHMFGIVKCREVNNIHHGHDAYLNIVVGNVWHSTYLRYWNSNCTFNENNALNKLFYKDKPGFWSTSYLDKIRNYILNSDKYLNKFVVTKTPIDRKGSFYDATIYPKGVAQFPLHNTSAYDIKKSGGYKNQYASYVCAVEYKNKKGITETDILPVFIKDRNEASKNMKEYVSRNFGVESTRLIYSHIPFDSLLEVDGVRYYLRGRDLKLFQLVVATEWQPSSEIISIIHDINNCLSKINQKELTSPDEKSVEFEFAKGKIISKSDIKLVFEAIVNQLKKPFYGKYAFVKKFNEGKLNIDKFYEANLLDQMKFILSMLNLITLNGSLFNAELIDGAANETCKYLTNLKGCSVYLISQSVTGLYEKRIKIIDPQ

SEQ ID NO: 188 - protein, 1352 aa, synthetic construct
  REGION 1..1352: note = MG44-188 effector
MEKFYLGLDIGTDSVGIACTDGDYRLLRAKGKDLWAVRLFDKAQTAADRRSKRTARRRLARRRKRIELLQSIFAPYMEDALFFIRLNNSAFTESDKDERLKSAFSLFNDENFKDKDYHKKYPTIFHLRKALIEGSQKYDIRLYYLACHHIIKYRGHYLYEGEGGEGLSAALLINEFNQAVNSTFGEQRYSLPEDKEKADEFIYALSQSGTIKDKQARLKDILDATDKSFVEIIKLLCGGAAKPAEIFDNENYKSEKSISFKDIADEAFMSLEETYGDDFTLLKAAKELFDFSRFQKVLGGKKYISEAMIDLYNKHAKDLKKLKDLLKERKPLYDKVFKSNKEKANYANYIGHDLVGGKKTTKVKNCKSEDFFKFLKTVLKDQSICDNNVAQEILKEIDDGAFLPKILNADNGLFPHQINGAELDAIIKNLIRDYPEFSLKDEDGFSAAQKIKTTFNFKIPYYVGPINTYHSGTEVGHSWMVRKESGKITPWNFEKKVDLAASNEEFMRRMTLKCTYLKGKDVLPKCSIIYQRFNTLNHINKLSVNTRAISVELKQRIFNELFLKKAKVTNRDILNFLYKNGFLSEDEKKSATIGGIDGEIKPTMNSYVTLKNILGDFVDEHPDVCENIILWHTLNTDKKIVESLISDNYGRYDIIKNNLKALRSLYFKDFGRLSKEFLCDLNGGTNDATGEVYTVLGELYNTNNNLNEILYDNKYGFLKEIDRRNGFDDNEITYEDIEELYVSPAVRRGINQALIMTDEYVSAIGRKPDKIFVEVTRDHEKGNDKNAKRKASRKTRIEELYKTLKDIETLKSELKEKTDSDLRSERLYLYFMQKGKCAYTGERIDLAGLNGDMYDVDHILPRSLVKDDSIDNKVLCLRQKNSEKSDVYPLPKGFSNCQNTWQELFKLGLMSKIKYDRLTRVTPLTDDEINGFINRQLVITDQTGKAVAELLKRKYGDKTKIVYSKAGNVSDFRQKYDFTKCRETNDLHHARDAYLNIVVGNVYDTKYSLPFKREYLNVDDERRQYNLDKLFVYEVKGAWKGYDQIPDIRKTYDRVSMAVTRYSYVGKGAFYDETVYPKADNVSAPKKSNGVLCDTTKYGGYKSLSTAYFSVVRTVDKKGNRVLSIEAVPVLASYKIKDDKEKLKEYFVSIGLKDPEIVVAKLKIKQLVEINGSNAYLAGTTGIQIVLHNAIEWFTDEKTDKYVKSLIKLADTLREGRIGDGEKNKEQFIMHTNRFGKNKTVVDKEHNEQLYEVITEKLSNKAYVGLSAAKTFLNNVSAGKENFKNLSALDQALALIQIMKFLKCNAETSNLEKIGASARAGSILINKNISNVSFKIIHTSPCGLTVRKIAIK

SEQ ID NO: 189 - protein, 1420 aa, synthetic construct
  REGION 1..1420: note = MG44-189 effector
MSNYDNFKKYGDYYIGLDVGTGSCGWAVTDKSYNILKVSGKCLWGVRLFPTADTAAERRAHRCARRRVFRIRQRLNLLEQLFDPEISKVDVGFFQRLKNSEFKEISKSNLFGDNSYKDKDFFKEYPTIYHLRYKLMNEPVDDIRLLFLAVHHIIKHRGHFLFERLDVNNIGASLPELWEQCCSQFVDISLFSNVSDDFQEIADSLKQNLIDMRDDVINVIRTSSDKRSDLKKVFAQLKSVYDEISDPEVKKSTENKVNRWYLLLLGYKVSAAEIFTIEESDEEGLSCKIKFNSSDYDEQIQKINDEFKGVVESEKAVYDVIKLQEILKDCNSISESKVELFNKHAEELRIFKSLLRERLTENLLAEVNKKVDVAKNEKLTTEPKSFYKEIFEERNKNTEKGKICFYYDITHGDKSANKEAIKGSSIYKRLQILAQILLCSSEIYKLSEKEKVLLHRIGDLSIFETQVSADNSVIPYQINLAELDKILKVQSKNFAFLSEKDDAGVSVYDKIKALLTFRIPYYVGPLNNHSKFSWIVKKSQEKIVPWNFESVVDTEKSAEAFIKRMTSKCTYLSGEDVLPKNSIIYSKFMVLNVLNNIRINGMRLDEAQTGLTKKVFDELYCNQINVTQKQLVAYLYNNGFLTSKEELTGFDDEQKVSMSSYVKIKNALGTDNFDINFAESFIKYSTLFPNDYLMIEKRLKREFSSECAKFNENLSKLCRIKFSGWGRLSEKLLTGLLGHNKNSEFDKNSILGFMLNGKGNLMELLSSEYTFSDLISSENSTLDKNDAFSYQNLVEGLYVSPSVKRMIWQTLLVVREITKKIMGYEPSRIFVEMARGATADQKGKRTNSRKKSILALYDKCRKDFDISEIYSSLEKQDDNKLLSDKIYLYYTQLGKSMYTGNKIELEDLLNNSKQYDIDHIIPQSLTKDDSIDNRVLVERTVNEEKDNNYPLSYQIRENQTQFWKHLLDLGLISKSKFERLIRSTSLSNSEKEGFIARQLVETRQSTKAIAGLLSKLYKKAKIIYPKAGLTADFKQKFDLIKVRELNDLHHAKDAYCNIVVGNVYYEKFTSKYQYVIANNERYSFSTSDTSYIFTNQNEKRLQQSGIWDSRNGCSISVVRKNYYRNNILKTIKQEEVKGKLFDLTLYGPSKATIKKKKHLGCEYGGYDKDYNTFFSFISFISKKKKIYRFIGIPLRIVENSNNIHDSIVQYLLGEKFENPQILIEKLPFPFILKNNETGFLYKVSSYEKANKRITLQQFNSLILSIRSQKILKAIESFERKVKLNDKKVNFVYDEKKSGFSEQDLTNLFSELKSKVENTFFNCLPVVITNVLKNIDLQTYRVKEKDSDERLLTIEQKVHVVVELLKAFQSNGASSDLHDIGESKNSGIVRTTELDFEKYSIINYSVTGFYFIETKLRDFIK

SEQ ID NO: 190 - protein, 1442 aa, synthetic construct
  REGION 1..1442: note = MG44-190 effector
MKAVKVSENDKTWYLGLDIGTNSVGFCASNSQYDILTKGNHLQCGARLFEDASDASNRRLKRSMRRRLARRKVRLQLLRELFAAAIDDGFFLSMDESKLLMEDKIGKSKYGLFNDDNFTDADYFKKFPTIYHLRYYLQNNKTDDIRLVYLASHHMMKYRGHFLFNQFNSSTSKDSLATMVEDINEYLAKTCESEEVELFYSKNIDSELKASKKTEKRTDFWDRIACSVNPQNNKKLKQVFEIVKGKNIKIKELWPELYESLVISGKNETIPNLSFKDSEFDNIFDDFISMGVLTDDQISLVCACKRLYDAINLNIILNGAETISEAQVKRYDQHKYDLSVLKAFVRKYLPDEYSKMFRWNTKSKFGNDATYVHYIQSSIVSNKKTVTHDKKCIDAIKKSCNSAKTASYEEFLDYIKKNIINVKSLSDDARESEEFKYIESRVGEGSFCQKLRTIDNAYIPNQLVAYELEKILRKQQSNFPCVLTDETIGKILNLITFRIPYYVGPLSDKDSDFAWVKRTEPNSHTPITPWNFDVEVDKFASGEVFISRMLSKCTYLKNETVLPKQSLLYQKFMLLQDINNLKVNGERITPELKNIIFNGICQQESSLTKKRIENYLKNDVRKLEKEDRLSKDDELDNAFNSSLSSYITCKKILGISSDQDLSPEHYDMCEKIIKWHTVFSSEKDAVRQRIKKEFGHILTDDQIEKFSRLNFSGWGRLSEKFLTGIKIKYRGREYSIMDILKEKCLNLMEILNATNFESNKECSDGDKSLFLEEVKQYNKQFEDDCSITYDDVKELYCSPIVKRSIWQTILVVKDLVKINKVFPKKVFVEVTRAEDVKKKNKLQSSRLEQIQKLYKEAKNIDKELSLQLNERVTKDQMRSDRIFLYFMQLGKCMYTGEPLDFDKVVSGSGMYDIDHIYPQSMVIDDSISNRVLVLRSANAQKKDVYPLSTDIRRNMKSYWDFLKNNKLLDSKKYDRLISSSPLSYEEISGFNNRQLVSTNQAVKSVCMLLDRMFNLKGGTEIVYSKAQHVSKFRQMYDILKCRDINDIHHAHDAYLNIVVGNVWSVMFKELPGTNENRKFENLWTKNFTKFKERVVEEKQNNGKSVDLVSLTTGCLFNSKYLHGFTKDIVWQADYIKKIKSYTINCNESYVNKFVITKMPQEITGAFYDETIHIKGNGGGSASGLIPLKKELDPNKYGGYRSETTSYLCLVEYKQKKKSSIELVREFCKVPVRLAVRQYKDEKEYLEQVCVFNGIKANLEEARIVCPKILIDHTLEIEGCRYYVRSGDLDCRTTCQWYPSPNIIKLVRAVVKNVSRLQPVKKEDEKKNIVIENITLSDTEVLFEAIVEQLKKKFYENYTFAKKIKDGNVSFDKFKSLELFKRIEVLNEMLKNINHSSSICHADAVGGAANDNCKWNKANPKRKVSLVTYSPSGLFENVIPLIN

SEQ ID NO: 191 - protein, 1062 aa, synthetic construct
  REGION 1..1062: note = MG44-191 effector
MKQKKVIKKWYLGLDIGTNSVGFCATDQDYNILTKNSKLQCGSRLFEAAHDASERRLFRAKRRRSARRKERIKLLQDLFGPAISKKDKDFFSRLNESNYHLEDKKVQSKHPLFNDPDYTDKEFYNEFPTIYHLRQSLMKDDCDDPRKLYLACHHLIKYRGHFLFKTFNTKSNENLVTIIESINQNLNNLAETLGIEIVSFEVPNEVDLSKIINDRQASKSLLSEKLNLLLNPQKNSILSTFLKFVKGDKVTINVISEKDKLQNILSVAELDDDFKKELKNFSFASDKFDELFEKLKDLLDDEQIGLIANLKSFHDLISLNRILFGHETIADSMVSRYKLHQEQLKIFKKFIKENCPTKYNEYNEIFRKNVKDIDKNNIHATYPNYIHSSLFNGVKTISHDDKCISTKNKNKLATSASYEDFLDNTKHLLAQILDSNHNIAQNEDYIKIKEWVDNGDFCKKHNLKENSLIPYQLTLKELDNILDKQQKNNNFPFLTEEFIEKLKSILTFKIPYYVGPLSEKHKSESITTSRKNNFAWIVKKSGHEKEKVYPWNFNEIVDLVQSGEQFIKRMTSRCTYLKDEDVLPKESMLYQEYMVLNELNMITINDEKIPQECKEIIYKELCLKGEKLSNSKIEELLIDRSKFTRGKDRVTYKGAYINNLTSYVTFKNILGEQIDSSKYRELCENIILWHTIFGDEKEHVKECIKESHYHDLLTSEQVQKLSKLNFKGWGNLSKKFLTDITITSTDRETVESELSILSLLRHKNLTLDEIKKSYGSQFLRMLEKENPKIDSKINYDYIDKLYCYATVKRSIWQAVKISQELTKINGCKPDKVFIEINRKDDKTIVAKSRKKQLEDKLNATKGKGVTEELLSLKSELLDNLKDYADYQLSDNDKLYLYFTQFGKCMYTGERISLLDLFNENIYDIDHIYPKSKKLDNSLDNRVLVKKIANGHKEDKYPIESNIQRKQKKFWLFLKNHNFISEKKYERLISSQELTDDIINGFTNRQIVSTNQAIKETDRALQHLFGYTSDEEQSRIVYSKAIFVSIFREKFNLAYISQLKLII

SEQ ID NO: 192 - protein, 1519 aa, synthetic construct
  REGION 1..1519: note = MG44-192 effector
MLVCFGIHSTFTSLIANNCLRIKRNYTCKISEFCIIFLRYFIKFIKHRNYIGIFTFLYFYCGKLLTVICFGVELFMKSVKISEFDRTWYLGLDIGTNSVGFCASNSQYDILTKGNHLQCGARLFEDASDASNRRLKRSMRRRLARRKVRLQLLRDLFAPAIDDNFFLSMDESKLLTEDKKGGVKYSLFNDDDFTDADYFKKFPTIYHLRYYLQNNDTDDIRLVYLACHHMMKYRGHFLFNQFNSSASKDSLVTMVDDINEFLIKTSDSDECEQFYSKNIDKELNATKKTEKRADFWDRIASSLNPQSNKKLKQVFEIVKGKNIKIKELWPELYESLTADGNKDAIPNMSFKDSEFDNVFNDFISTGVLNDNQISLICACKRLYDAINLNIILNGSETISEALVKKYDQHKKDLRVLKAFVKKYIPDEYNKMFRWNTKEKSGNDATYAHYVQSSITNNKKTIAHSKICISAIGKSSNSSKTATYDEFIDYLMKNIINAKRLTDEAKESEEFKYIESQVTEGLFCQKLRTIDNAYFPNQLVAYELEKILRKQQSNFPNVLTEESIEKIIKLITFRIPYYVGPLSDKDNDFAWVKRTTANSHTPVTPWNFDTEVDKFASGEEFISRMLSRCSYLKNETVLPKQSILYQKFMLLQDINNLKVNGCRINSQLKDIIFNGICQYETSLTKKKIENYLKNDVKKLEKEERLSKDDELDVSFNSSLSSYITCKQILGISHDMDLSPVQYDMCEKIIKWHTVFLSEKEAVRQRINNEYGHILTTEQVEKFSRLNFSGWGRLSEKFLTGIKVNYRTREYSIMDVLKEKCLNLMEILNASNFDNHNERDGGDKGLFLEAVKQYNKQFEEDCSVTYDDVKELYCSPIVKRSIWQTLLVVKDLVKINKVFPKKVFVEVTRAEDIKKKNKLQASRLEQIQKLYKDAKNIDKELSSQLNERVTKDQMRSDKIFLYFMQLGKCMYTGQPLDFDKVVSGSGMYDIDHIYPQSMLIDDSISNRVLVLRSANAQKKDIYPLSSDIRSQMKPFWEFLKNSKLIDSKKYDRLISSAPLSYEEIAGFNNRQLVSTNQAVKSVCMLLDRMFNLRGESRTEIVYSKAQHVSKFRQMYNILKCRDVNDIHHAHDAYLNIVVGNVWNVMFKELPGTNENRKFENLWTKNFTKFKERIIEENQNNGKSVDLVGLTTGCLFNSNYLKGFTKDIVWQADYIKKIKSYTINCNESYVNKFVITKMPQEITGAFYDETIHIKGNAGGSATGLIPLKKDLDPNKYGGYRSEATSYLCLLEYKLKKKSSMEVVREFCKVPVRLAIRQFKDEKEYLEQVCVMNGIRVNPEEVRIVYPKILIDHVLDIEGCRYYVRSGDLDCRTTCQWYPSPNIIKIVRAVIKNITRLQTAKKEDDKKNIVIENITPSDTEILFKAIVEQLKKKFYENYTFAKKINEGSVFIEKFKNLELFERIEMLNEMLKNINHSSSICHAEAVGGAKNDNCKWNKAKPKQKVSLVTYSPSGLFEKVIPLIN

SEQ ID NO: 193 - protein, 1467 aa, synthetic construct
  REGION 1..1467: note = MG44-193 effector
MIDPFLSTECGKLSFVMRFFCSEFRMKAVKVSENDKTWYLGLDIGTNSVGFCASNSQYDILTKGNHLQCGARLFEDASDASNRRLKRSMRRRLARRKVRLQLLRELFAAAIDDGFFLSMDESKLLMEDKIGKSKYGLFNDDNFTDVDYFKKFPTIYHLRYYLQNNKTDDIRLVYLASHHMMKYRGHFLFNQFNSSTSKDSLATMVEDINEYLAKTSESEEVELFYSKNIDSELKASKKTEKRTDFWDRIACSVNPQNNKKLKQVFEIVKGKNIKIKELWPELYESLVISGKNETIPNLSFKDSEFDNIFDDFISMGVLTDDQISLVCACKRLYDAINLNIILNGAETISEAQVKRYDQHKYDLSVLKAFVRKYLPDEYSKMFRWNTKSKFGNDATYVHYIQSSIVSNKKTVTHDKKCIDAIKKSCNSAKTASYEEFLDYIKKNIINVKSLSDDARESEEFKYIESRVGEGSFCQKLRTIDNAYIPNQLVAYELEKILRKQQSNFPCVLTDETIGKILNLITFRIPYYVGPLSDKDSDFAWVKRTEPNSHTPITPWNFDVEVDKFASGEVFISRMLSKCTYLKNETVLPKQSLLYQKFMLLQDINNLKVNGERITPELKNIIFNGICQQESSLTKKRIENYLKNDVRKLEKEDRLSKDDELDNAFNSSLSSYITCKKILGISSDQDLSPGHYDMCEKIIKWHTVFSSEKDAVRQRIKKEFGRILTDDQIEKFSRLNFSGWGRLSEKFLTGIKIKYRGREYSIMDILKEKCLNLMEILNATNFESNKECSDGDKSLFLEEVKQYNKQFEDDYSITYDDVKELYCSPIVKRSIWQTILVVKDLVKINKVFPKKVFVEVTRAEDVKKKNKLQSSRLEQIQKLYKEAKNIDKELSLQLNERVTKDQMRSDRIFLYFMQLGKCMYTGEPLDFDKVVSGSGMYDIDHIYPQSMVIDDSISNRVLVLRSANAQKKDVYPLSTDIRRNMKSYWDFLKNNKLLDSKKYDRLISSSPLSYEEISGFNNRQLVSTNQAVKSVCMLLDRMFNLKGGTEIVYSKAQHVSKFRQMYDILKCRDINDIHHAHDAYLNIVVGNVWSVMFKELPGTNENRKFENLWTKNFTKFKERVVEEKQNNGKSVDLVSLTTGCLFNSKYLHGFTKDIVWQADYIKKIKSYTINCNESYVNKFVITKMPQEITGAFYDETIHIKGNGGGSASGLIPLKKELDPNKYGGYRSETTSYLCLVEYKQKKKSSIELVREFCKVPVRLAVRQYKDEKEYLEQVCVFNGIKANLEEARIVCPKILIDHTLEIEGCRYYVRSGDLDCRTTCQWYPSPNIIKLVRAVVKNVSRLQPVKKEDEKKNIVIENITLSDTEVLFEAIVEQLKKKFYENYTFAKKIKDGNVSFDKFKSLELFKRIEVLNEMLKNINHSSSICHADAVGGAANDNCKWNKANPKRKVSLVTYSPSGLFENVIPLIN

SEQ ID NO: 194 - protein, 1448 aa, synthetic construct
  REGION 1..1448: note = MG44-194 effector
MADTIKKVESKEWFIGLDIGTNSVGWCATDTEYNILTKNGKLQAGARLFEDAHDASERRTHRANRRRLARRHVRLDLLRQIFSSKIDDSFFLSLDDSCFIKDDKTNHQKYSLFNDKDEHGEYTFTDKEYHHMYPTIFHLIEHLKTEDEKDPRLLYLACHNLIKNRGHFLFNDFKIENESSFIKESVSNINSLLKETGYLNDDEDLFNTAFNDTDFVNIFKIKKSAEQWEKISELLNNSKSKKLNIIINILKGQKISIDKLWPDNYKENIDDYKDNLKEFKFLSDNFDECLSFAETILDDSELSLIIALRELYDILLLKKIIGESKSLSEAMVSRYNKHHHDLKIFKKFIKENIPDKYNEIFRNNPNYKEKDQQHASYVNYIGSGICNNCKKISHDIKCIDSKDKKENKKQEENNKNDLAVSCSYEDFLKYVTKLLDNNKHLSENSDYKYIRDAIGTEDFCKKIRIKDNAYIPHQIKAHELKSILKRQKNSLPDLLTDENISKIVSLLTFRIPYYVGPLSDAHSNFAWVERKNPHSTVKITPWNFNEEVDLNRSGEKFIERMISKCTYLKNEYVLPKQSILCQKFEVLNELNNLKINGDRISHKMKIYIYDNLCKSDKGISLSKKKIKDFLISRGKIDKNCQVGKENENDKVFNSNLSSLIQFRKILNQDILSKDDEIMCENIIKWHTVFSDEKTPVKERIIDNYKGRLNDQQIEQIMRMNFKGWSRLSEKFLTGITTHRKENEFSQLTIIDLLEKEEHNLIEILNSNNFSPKFLDIVKEINGKNDVVKFDYEHLVKDLYCSPIVKRPIWQAIQICKELAQINKSNPKKIFVEVTRTNKSDKKGKITSSRKEQIEALLKTALKDSSEYEKIMNELNKKNHQELRSDRLYLYFTQLGKCMYTGETINLADLNNEKLYDIDHIYPQSKIKDDSLNNRVLVKRITNANKSDHYPLDKFIRDNMRSFWEKLKNSKLISQEKFNRLICSTELTEEQIGGFVNRQLVSTNQAVKETIGILETIFKDTKVVFSKAELVSEFRNRDNHKLVKCREVNNLHHAHDAYLNIVVGNVWHTYYNDNFFNAHRIVSDKAIDKLFVDNEKHSNKYWKNQYDIKINDYLFNNKKYLNKFMVVHAPKEVKGPFYDQTIHPKTKGLYPLHEDSNNNDLWSVNKYGGYKTENTAYMCCIKFMTPNGAEIRGLYPVSVKNATKFKNNKIGLLKQICQENNINIAKFSPKFVKDKILMFSVLEIDGIRYYFRSKDLQCSADYEWYPDQEITQIIHDIVKFEKRVISKEFEEEKEKLDNNYNGDLPLRTRKINSKEHENIYLTKENNLKVYDALIDQLKKPMYKEYPFAKAVICGKISRNSFINLGTYIQIKQLLNIINNVAIHNGSTCDATKINGDKTHQCKCRINYKSPNLDRLSKQNLNKIGAGKHIITLISQSITGLFEVKIPLIF

SEQ ID NO: 195 - protein, 1449 aa, synthetic construct
  REGION 1..1449: note = MG44-195 effector
MKSIKVSKDNKEWYLGLDIGTNSVGFCATNLQYDILTKGNHLQCGARLFEDASDASERRTKRSIRRRLARRKVRLQLLKELFAPAIDDSFFLSMEESNLLIDDKTQKHRYSLFNDKDFSDADYFNKFPTIYHLRYFLQNNITDDIRLVYLACHHMMKYRGHFLFNQFNSSSSNESFSKIVEDINECLLKTSESDDCEQFYSADIDNVLNDSKKTERRADFWDRIANSLNPKNDKRLKQTFEIIKGKNIKIKELWPELYESLESSGKKEEIPNLSFKDPEFDGVFSGLISAGIFSDDQISLICACKQLYDTINLYLILDGAETISEAQVKKYNQHKEDLKVLKTFVRKYIPDEYNKMFRWNTKEKSGNDGTYVHYVQSSNVNNKKTIAHSSICTSPKAAGKTCNSATTANYEDFIDYLKKKIINPKQLSNEAVESDEYKYIESRVSEGIFCQKLRTSDNAYIPNQLVSSELEKILHNQQSSFPEVLTEDTIEKIIKLISFRIPYYVGPLSDKNDNFAWVKRTTPHSHTPITPWNFDEEVDKFASGEEFISRMLSRCTYLKDETVLPKQSLLYQKYMLLQDINNLKLNGSRIKPDLKDIIYNGICQNETSLTKKKIEDYLKGIKKLEKEDRLTKNDELDSAFNSSLSSYIICKKILGISAGDLSSQQYDMCEKIIKWHTVFSSEKDAVRQRIEKEYGSVLTIDQIEKFSRLNFSGWGRLSEKFLTEIKVTYRSREYSIMDILQEKCLNLMEILNATNFDNVKVHEEGEKSLFLEEVKKYNMQFDNDCSITYDDVDELYCSPIVKRSIWQTILVVKDLVNINRVFPKKVFVEVTRAEDIRKKNKLQSSRLEQIQKLYKEAKNVEKEYKEISSQLNERVTKDQMRSDRIFFYFMQLGKCMYTGRPLDFDKVVNGDGMYDIDHIYPQSMLIDDSLSNRVLVLRSENAKKTDIYPLSDEIRTKMRPFWDFLKSNKLLDSKKYDRLISSSQLSSEEIAGFNNRQLVSANQAVKSVCVLLDRMFNLQGESKTEIVYSKAQHVSNFRQIYKILKCRDVNDIHHAHDAYLNIVVGNVWSVMFKELPGTNETRKFENLWTKRFAEFSESIIEEGKNNGNNVDEISVTTKCLFNSKFLHGMGKDVVWQADYIKKIKSYTINCNESYVNKFVITKMPHEITGAFYDETVHIKGEHTASADGLIPLKKGLDPNKYGGYRSEATSYLCLIEYKQKKKAKIETVREFCKVPVRLANLREKDEKDFLEKICLLNGIKVSSDEVRIVYPKILIDHTLEIDGCRYYVRSGNLDCRTTCQWYPSPDIIKIVRAVAKNISRLQSAKKDNKKIKIDIENITFSDTEYLFNAIVEQLRKKFYSNYTFAKKIMAGDVTLERFKKLDLVRRIEILNEIMKNINHSSSVCKSNEIGGAKNGDNCRWNQANPKGRKVSLVTYSPSGLFEKVIPLIN

SEQ ID NO: 196 - protein, 1380 aa, synthetic construct
  REGION 1..1380: note = MG44-196 effector
MDNKKWYLGLDIGTNSVGFCATDTEYNILTKNSKLQCGSRLFEDAKDASERRLYRSSRRRMARKKERINLLQQFFDQAISSVDPAFFIRLKESNYHLEDKSTGTASKYPLFNDPDFTDIEYYKKYPTIYHLRCALMNDDITDPRLLYLACHHLIKYRGHFLFEQFNSDSDADLIGLVDAINDDLNGIFSEENETNDILLSTENVSQIYEIINDKKVSDKDQWFSIFQILNPTANKIVKKICDTLKGSKIDLKSIAPSLEIDDDLKESLKDFRFGSEQFDDTYSLLEQYLDDQHLSLLMHLKQFYDFISLNRILSGFSTVAAAMVDRYNLHHEQLLAFKRFVKKYKPESYNSFFRKNFVYDRKKDSNGTYQNYVKSNKSNGKKVLAYSALCIEKKQQGHIPVIATYETFLSYTKKFIDTCEKNIPEIINDEDFKIIKSGLESDNFCKKHNLKENSYIPYQLTLKELDLILNRQRKNFSFLTDDVVDKIKKILTFKIPYYVGPLSEKDKGTFSWIVKKPGHEKQKVLPWNFDDIVDRAASGEEFIKRMTSKCTYLRNEDVLPKQSLLYQKYLVLNELNNVSIDNNKIDQNIKKAIFEELCCKGIKLSKTKIENFLRDKHLISKENHVTYNGSFNESLSSFDKLKKILGDKFNDTMCEDIILWHTVFANEKDPVKSRIIEKYGQELNPSLIDKLSRLAFTGWGRLSRRFLTELGTTDVRTGETALSIIHLLEDTNLNLMQILNSDNYSPSFINLVNQENTLDTSETLNYDYVKNLYCSPTVKRSIWQAIRISKELTQINGCDPEKIFIEVTRTNDLKNKGKVTDSRRKQLQDKFNKTKKIKDDLSQLLDEFNKRTDLREFRGDRLYLYFMQLGRCMYSGEKINLDELYDRNLYDIDHIYPQSIILDDSLDNKVLVKRHINAVKSDNYPLSSDIRNSQRAFWDMLKKYDFISETKYNRLISSKELTSDIIGGFLNRQLVSTNIAVKETAKALSQIYPGNNRIVYSKAGHVSDFRHMFGIVKCREVNNIHHGHDAYLNIVVGNVWHSTYLRYWNSNCTFNENNALNKLFYKDKPGFWSTSYLDKIRNYILNSDKYLNKFVVTKTPIDRKGSFYDATLYPKGVAQFPLHNTSAYDIKKSGGYKNQYASYVCAVEYKNKKGITETDILPVFIKDRNEASQNMKEYVSRNFGVESTRLIYSHIPFDSLLEVDGVRYYLRGRDLKLFQLVVATEWQPSSEIISIIHDINNCLSKINQKELTSPDDNSVEFEFAKGKIISKSDIKLVFEAIVNQLKKPFYGKYAFVKKFNEGKLNIDKFYEANLLDQMKFILSMLNLITLNGSLFNAELIDGAANETCKYLTNLKGCSVYLISQSVTGLYEKRIKIIDPQ

SEQ ID NO: 197 - protein, 1386 aa, synthetic construct
  REGION 1..1386: note = MG44-197 effector
MKKQNNYYIGLDLGTNSVGWAVTNEKYELLHLKRKPAIGVNTFEKAKTAEQRRNYRSTRRRLARRKQRVLLLQTFFAEEVAKKDPTFFLRLNNSPYFKEDKHHSLQDTKFSLFNDKDFTDKDFHKKYKTIYHLQNDIISQPDKKFDIRLVYLAVHHLIKYRGNFIKQDENINVAEFTNSLVTDAFQELAHYFEDTDLIAAQNFFVNENVRKYEAIVSDKTNGGLKRATDKIFEQFEIKDKTLKTLLSLALGKVTRLNQIFSDEIVDDEQGKITIDFKSISYEEKYNDIKTVIGEVNIVLIDELKRLYDYFVISRLMDGKTLVAEAMVEKYEKHRSDLALLKKIFREHASKEDYRKVFTTLYTTDDKGKKKVITDVNYPRYIGKKSPYVIVKKGDYADFKKFLNKMFKDLGLLSLNDVIKVQEGLDDETFLPLINSKDNATIPYQFNEYQLRLILENQSKYYKFLNEKVDESSLTTLEKIMSIISFKIPYYIGPLVAEDNHPFAWVKRKSFEKVTPWNFSDVIDEATSASRFIERMTNKCTYIPTEDVLPREAILYQEYLALDVLNNLKINGEAIDNYAKQTLLTALYSNKTPLTKKRIATILAKNKNDVVAVSGIDDDVKLAFTSLHKFKAILGENQDLTIEDMEKIIFYRTIFTEQKMFNKKVDELLGHRLSEELCKKIKQLKFKEWSRFSNAFLTGFSKTLNKPVLFDEKTGEVISIIDIMRNNVLSLQQVIHHEKYGVLEALNKYNESMKTNENAFEDVYNLYLSPSVKRPVIKAIHLVDEIIKANDNKLPKKIFLEVTRHDDFARKGTKTISRKKQLDDLYKIAVKESKDLKDLMDELNKKTDADLRSRKLYLYFLQHGKCLYTGNPIALENLVMGDYDIEHIIPQSLITDDSLNNICLVESNINKAKGDVYPLPRTIVNVEKMKPFWERLMKRGFMSESKYQRLIRMSELTEEERFSFINRQLVETSQANKAVAKILEDRYGKGSVVYSKAQRVSDFRHKFKLLKQRDLNKAHHAHDAYLNIVVGNYNDAQTRLAYINKQTGKNFKFNPATAFEEKSFLDVWDKKSNLATIKAVLSRKNILFTQGTYISKGEFYDQQLSPAGEGKLTPVKESGPLSDTTKYGGYSSLNTSHFALVEIPKKRGSERRLIQVTRLHFAKIASGKMTLEEYLITYVGLENPKVIIDVIPLNSLIKRGKTIRSISAFDSGNTLIAHNHQEPFFSKDIEDSYYYLNRYLREIELREKEDTELLTSNEPYTIIIGNRNEKEKVQKIVISKESNEKTYLELAMHFAKDIYEHIFRGVNDTLLSNLDNFKTKSIYEQANIIKQLVMLLQTGALPASINLTSVGLNKSINRNRNINLIEKGDKLLIQSITGLYDKEICLA

SEQ ID NO: 198 - protein, 1420 aa, synthetic construct
  REGION 1..1420: note = MG44-198 effector
MSNYDNFRKYGDYYIGLDVGTGSCGWAVTDKSYNILKVSGKSLWGVRLFPTADTAAERRSHRCARRRVFRTRQRLNLLEQLFDPEISKVDVGFFQRLKNSEFKEISKNNLFGDNSYKDKDFFKEYPTIYHLRYKLMNEPVDDIRLLFLAVHHIIKHRGHFLFERLDVNNIGASLPELWEQCCSQFVDISLFSNVSDDFQEIADSLKQNLIDMRDDVINVIRTSSDKRSDLKKVFAQLKSVYDEISDPEVKKSTENKVNRWYLLLLGYKVSAAEIFTIEESDEEGLSCKIKFNSSDYDEQIQKINDEFKGVVESEKAVYDVIKLQEILKDCNSISESKVELFNKHAEELRIFKSLLRERLSESLLAEVNKKVNVAKNEKLTTEPKSFYKEIFEERNKNTEKGKICFYYDITHGDKSANKEAIKGSSIYKRLQILAQILLCSSEINKLSEKEKVLLHRIGDLSIFETQVSADNSVIPYQINLAELDKILKVQSKNFAFLSEKDDAGVSVYDKIKALLTFRIPYYVGPLNNHSKFSWIVKKSQEKIVPWNFESVVDTEKSAEAFIKRMTSKCTYLSGEDVLPKNSIIYSKFMVLNVLNNIRINGMRLDEAQTGLTKKVFDELYCNQINVTQKQLVAYLYNNGFLTSKEELTGFDDEQKVSMSSYVKIKNALGTDNFDINFAESFIKYSTLFPNDYLMIEKRLKREFSSECAKFNENLSKLCRIKFSGWGRLSEKLLTGLLGHNKNSEFDKNSILGFMLNGKGNLMELLSSEYTFSDLISSENSTLDKNDAFSYQNLVEGLYVSPSVKRMIWQTLLVVREITKKIMGYEPSRIFVEMARGATADQKGKRTNSRKKSILALYDKCRKDFDISEIYSSLEKQDDNKLLSDKIYLYYTQLGKSMYTGNKIELEDLLNNSKQYDIDHIIPQSLTKDDSIDNRVLVERTVNEEKDNNYPLSYQIRENQTQFWKHLLDLGLISKSKFERLIRSTSLSNSEKEGFIARQLVETRQSTKAIAGLLSKLYKKAKIIYPKAGLTADFKQKFDLIKVRELNDLHHAKDAYCNIVVGNVYFEKFTSKYQYVIANNERYSFSTSDTSYIFTNQNEKRLQQSGIWDSRNGCSISVVRKNYYRNNILKTIKQEEVKGKLFDLTLYGPSKATIKKKKHLGCEYGGYDKDYNTFFSFISFISKKKKIYRFIGIPLRIVENSNNIHDSIVQYLLDEKFENPQILIEKLPFPFILKNNETGFLYKVSSYEKANRRITLQQFNSLILSIRSQKILKAIESFERKVKLNDKKANFVYDEKKSGFSEQDLTNLFSELKSKVENTFFNCLPAVITNVLKNIDLQTYRVKEKDSDERLLTIEQKVHVVVELLKAFQSNGASSDLHDIGESKNSGIVRTTELDFEKYSIINYSVTGFYFIETKLRDLIK

SEQ ID NO: 199 - protein, 1376 aa, synthetic construct
  REGION 1..1376: note = MG44-199 effector
MEKFYLGIDVGTNSVGMACADENYKLLRAKGQDLWSVRLFDEAKTAKERRTFRTARRRLERRKQRIKWLQELFAPYITDKNFFIRLNNSAFFPGDKDELLRQDKNSLFADDNFKDKNFFKEYSTIYHLRKALADGTADELDLRFYYLALHHIIKYRGNFLYDGSLNDLGDASALFAELNAATIDFFGEEHMYFAPEKVADAKRILISKSGLNDKKKSLNELFDEKSFGADIAPRFKEIITALCGGKFSPKKLFGDEYEEQKNFSLDEISDDDFEAKKVEFGDDEVAVLVAMRKIVNYAKFSKIIDGYFGCAAPLSEAMVALYNKHKADLKKLKDFIKTNGTNELYYKFFKSTEEKNNYVNYVGYTRKGGDKKKVEKCKEEEFFAYTKKFLIENFGKLCETEKEQGKILKEMLASIESKSFLPKILHADKGLMPRQLNQAELNKIVENMQKRMPETKEIAEKIEKLFLYKIPYYVGPLSYAGTIKDKNGVAPGHWAVRNIGKENEKITPWNFDEVINKAASNREFMRRMTNKCTYLRGEDVLPKRSIIYQKFDVLNQLNKLRVNDKPISVELKNKIYNNLFLTKKKVTDKGIKDLLVREGIISEKERGQTELTGKDGEFKANMSSYITFCELFGKEFVDSDLEKSDSVCENIILWHTLNEDKKLVEQLILENYGKIPQIKSNIKVLKGLSFKEFGRLSKRFLTGIAIADKKTGEYVGGVLDVLENTNLNLNELLFDEKYSLAKTLAEENGETDSAVTFDDVNELYVSPAVKRGVWQAIKMADEYVSVLGRVPNKIFVEVTRENDPKKKGVRTFSRKDELLKKYRAMKNAEDYKDVIDALSGNETYDDMKLRSEKLFLYFCQLGRCAYTGERIDLSLLNSAYDVDHILPRTYIKDDSLDNKVLVKREKNATKDDDYPLPQGFTDQRPLWEFLKNAGLMSKTKFDRLTRVEPLNDDDYNYFINRQKVITDQTAKAVAELLQRKYPNTKIVYSKAGNVSDFRDKFSLFKCRETNDLHHARDAYLNVVVGNVYDVCFPSYINTMRKQEDEWRRRNLKNLFLRNREGAWVKDDDLSITSVKNTYGKHTMAVTRMATVGKGGFYDQTIWKKDDKKVSVGRKGTGVLSDFEKYGGYSGLSTAYFAVVGSLDKKGNLKKTIEAVPVLIDYKAKNDENAVINYFSEYIDSPKIIVPQIKTKQLIRYNGTPFYLASGSRYDNRISAYNASQLFTDNKTDEYFKAVKKLLDMNKEVKQKPESEEFIMKTNNEGVRKLVITRQSNIEKYDMLAAQLGKDFYQVLSPFRNVKKIIDEGKEKFCELLVIDQCYVLMQILSYLQCKGATADLQLIGGSGRSGQIRFNKDITNVDFRIYDTSPTGLFVKESKA

SEQ ID NO: 200 - protein, 1351 aa, synthetic construct
  REGION 1..1351: note = MG44-200 effector
MEKFYLGLDIGTESVGIACTDENYRLLRAKRRDLWAVRLFDEAQPAVNRRTKRAARRRLMRRERRIDLLQEIFAPYIGDDTFFLRLNNSPLWLEDKDEKLSGKYCLFADKNYTDKDFHREYQTIYHLRKELCDGKKKVDIRLFYLAIHHIIKYRGHFLYDGSLAEIRNISKLFAELNDACEEVFGDDAPSFDIEKAEEFKKKATEKKGLNDKCKEIIALFGVKDDLSKNIIKYIVGSKVAPKAVFGEQYADEKSFSFKEVSDEEFEGKREGFGDDFVLLEKMREIYNFVAFEKVLNGKECISEAMIDIYEKHRKDLKILKYFIKNEYGDEAYRTLFKDVDKGNNYANYIGMAKVNGKKVYVKKCVKYDDFKAFLKKLLATKPKSEIVDDYTYDYVMKELEEDRFLPKILNSDNGLFPNQINLAELDKILANLKKFYPETAEITEKIRSIFTFRIPYYVGPLNTYHSDKGGNSWMVRKEDGTILPWNFADKVNLAASNENFMRRMTNKCTYLSGEDVLPKFSILYQKYNVLNQINKLKINEIPLTVEQKQGLFNDKYLVDAKMSDRKIKDYFVEKGWLTAEEAKSAVISGKDGELTVSMSSYIRLKKILGELVDENLRMCEDIILWHTLNTDKSIVKSLILTKYGDIPAVRNNIGRLNGLTGLKDFGRFSEKFLTGINGGEDPVTGEIYTILSVLYDTNMNLNEIINDDKYGFKYAIKEHNLGINQTIEDEIEELYVSPAVKRGISQAMKMVDEYVSAIGRAPDKIFVEVTRADGTKGDAGRSVKRKDNLLKLYDSVKKEGIEGYEELLKELKENETDLSLRSERLYLYYMQLGRCAYSGEPIDLAYLPGDTYDVDHILPRSYTKDDSLDNKVLVKRDKNAIKGDKYPIPYTLVTDKARKLWKVWKEKGLISDKKYKLLTRTEPLGADDYNDFINRQKVFTDQTTIAVAKILEARFKASGTKIVYSKAKNVSDFKSKFNIVKCRETNDLHHARDAYLNIVVGNVYDTRFGNVRAYFYRNEDENSFREINLKYMFTTDTPNAWKTGETAYTVIETLAKPSMAITRYSYTNKGQFYDETLQKKGANCSAPLKGKGPLSNTEKYGGYTGLTTAYFVVAESDGKKGARMKTIEAIPVYKEYGIKSDEVKIKDYLENECGLKNVKLLVPKLKIKTLVKINGFNAWLAGMFNNYVIVHNANEWFTDKDTDDYVNGLGKLIETAKNGSVDENEEEYVIKTNRKKEVKQVINAENNIRLYDKIVEQTSKKIYEGISGAKIIVKTIKEGRDKFVSKSVLKQARILLQMIKYLKCNAELANIAEIGGSANSGKLYTNKDITNTNFEIVHVSPCGLKTIVVKV

SEQ ID NO: 201 - protein, 1347 aa, synthetic construct
  REGION 1..1347: note = MG44-201 effector
MEKEQKFYLGLDIGTNSVGIACTDENYNLLRVKGKDCWAVRLFDEAQTAADRRIARTARRRLQRRRYRINQLQGLFAPYMQDNLFFLRLNNSQFFADDKAGELNGDVNNLFADSGFTDRTFHQKYPTIYHLRLALQQSPVDDIRLYYLALHHIIKYRGHFLHDGSVSEVRDVHKLFDALNTVCENTFAENTPHFDIEKADEAKDMLLRSKGKLKDTVKNIKQLFSVQNDDCGKIQTEIINGFCGAKFSPEKLLGDGYSEEKSFAFREVEDEAFDAMQSTYGDDFALLKAMREIYNFVTFERLFNGQPNISSAMIAVYDKHKSDLKKLKDFIKKNYADDGGKKCREMFSDVTQKANYVNYVGHVGYGKSRKRVKTCDYDSFIAYVKKFLMGGNFAHDETYDEIMEEIEAKTFLPKILHSDNGLVPHQVNEDELVKIVAQMVQAFPETAQMANKILPLFLFRIPYYVGPLVGSNSWAVRKSDEKITPWNFRDVVDEAASNEEFMRRMTNKCTYLHGVDVLPKCSIAYQKFNTLNQINKLKVNDCAISVPLKQKIFAELFLVKPRVSDKMIASLIVREGAVAPGDSVVLSGKDGGDIKASMSSYIQLKRILGDFVDYDLASGGNVCENIILWHTLNTDKRLVEDLIVKNYGDNPAVAPYVKQLKGLVFNDFGKLSGRLLTELGVVDKQTGELCTVTDLLWNTNENFNELMFDKRYNLEEVIAAENNDDDGKVDYEEVQKLYVSPAVRRGIWQSLQMVDEYVAALGKEPDKVFVEVSREEGVKGDKGRTHSRKKQLLEKYKNIDPKDVENIDELTGELNSDKISDMRLRQERLYLYFRQLGRCMYSGEPIDLDHINDSKLYDVDHILPRSYIKDDSLDNKVLVLRSKNAEKSDTYPLPLGFTNQQGWWKMLRAKDLISSRTYDRLMRTAPLTDDDYNDFINRQKVITDQTSKAVIELLKRKYPSATLVYSKAVNVADFKSKFDLYKCRETNDLHHARDAYLNVVVGNVYSTVFGVRIETYVKDGEKWKTYNLKKMFTRDVPGAWNENSIRTVKGVYNSSSMCVTRYAYCNKGAFYKQTVYSGNENITAPRKGKGPLANMERYGGYMTQSTAYFAIVESQGKKGRIKTIEAVPVMVDYQSRNDPDRVVKYFEENGLVDVKLIVPKIKIRQLVSYNGSWVYLAGVGDVRILVHNATELFVDNKIDDYVNQLLKIVEMAKQPTFNKNSDCYIVKTNRMGDIKLVVDKESNVKLYDELILKLECKQFQGFGAYTSFRNVLTESREKFVDLSTLEQAIVLLEVLKFFKNNADTADLSLIGESKRAGILRFSKNITDVDFRIISQSPCGLTVHVKRV

SEQ ID NO: 202 - protein, 1337 aa, synthetic construct
  REGION 1..1337: note = MG44-202 effector
MEKFYIGTDIGTNSAGVACTDENYNLLRVKGKDCWTVRLFDEGKTAVDRRTFRTGRKRLQRRKQRIAWLQDLFAPYMEDETFFIRLNNSQFLPEDKDALLGGDKNTLFAGVYDDKKFHTEFPTVYHLREALMRGGVNDLRLYYLALHHIVKYRGHFLIEGSVDDVRDFCRFLGELNEGDSKVYGDDFPTFSEAAVDEAKNVLLDKTLGIKDRSSKLEKIFGVSDKTSKEIIKGMCGGKISPAVLFGDEYKEEKSFSFKEITNENFEGMRATYGDDFALLEGIRSVYGYVTFEKLLSDHTDLSSAMMDVYDKHKKDLLALKAFIRSERPEDYNKIFKSTDEKYNYVNYIGYTKKGGDKKKVKKCKDDEFYAYIKKYLQGLTDVKDIAARDKFLKDIEAGSFMQKILHSDNGLFPKQINEYELKKILENMVKSFPATAEIKDKIVTLFNYRIPYYVGPLAGKEETCWAVKKSNEKITPWNFDDVIDKAKSNEKFMLRMTNKCSYLRGEDVLPKASIIYQKFDTLNQLNKLRVNDELLTVDLKQKIFNELFLKYPKVSDKKIIDLLVREGKISQNDRSEVTLSGKDGEFKTSMSSYIHLKNILGDFVDKDLSENGGVCENIILWHTLNTDKNIVVDLIKENYGKIPEIKNAIKQLKGLVFHDFGRLSRKLLCEIYTVKEDTGELWNVLDALYETNENLNELLNDEKFSFGRNIKEENGEMTSDVGYKDVEELYVSPAVRRGIWQTLTVVDEYVKAIGKAPDKIFVEVTREDGIKGDAGRTQSRKRRLQEKFRTVSDAYADVIAELGEERFTDLKLRQERLFLYFRQLGRCMYTGERIDLNSINDITRYDVDHILPRTFIKDDSLDNKVLVLRSKNAKKSDTYPLPAGFSNQRDFWKMLLDKGLIAKVTYDRLTRTEPLREDEYQDFINRQKVITDQTVKVVAELFKRRYPTAKIVYSKAKNVNDFKQKFDLFKCRETNDLHHARDAYLNVVVGNVYDTVFTTPMSMYRKDGDVWRTYNLNKLFTRDVKGAWDNAQSIATVKKVYSKNSMVVTRYATCNNGGFYNATVYSKDEKGITAPRKGKGPLSDSSKYGGYMTQPTAYFAVVSSKDKNGNEIKTIEAVPVLTAYMAKNDPKAVEKYFTGRLKDAKIVVPKIKIKQLASYNGTLCCLAGTTDNRILVHNAVQLFTDGKTDEYVNSLLKLADMKTKGIINVGQEEFVMKTNRDGERKLVIDRANNADLYDMLKRKLERENYAGLSAFATFRKNLEKGEEKFNSLTVYEQTVVLLQILKFFKCNAETADTTLVGGSAKSGSIKFNNNITNVDFRLIDLSPAGLTERVRKV

SEQ ID NO: 203 - protein, 1337 aa, synthetic construct
  REGION 1..1337: note = MG44-203 effector
MEKFYIGTDIGTNSAGVACTDENYNLLRAKRKDCWAVRLFDEGKTAVDRRTFRTGRRRLQRRKQRIAWLQDLFAPYMEDETFFIRLNNSQFLPEDKDALLGGDKNTLFAGVYDDKKFHTEFPTVYHLREALMRGGVNDLRLYYLALHHIVKYRGHFLTEGSVDDVRDFGRLLGNLNGVISDVYGDEVPLFSEAAVDEAKNVLLDKTLGIKDRSSKLEKIFGVSDKTSKEIIKGLCGGKISPAVLFGDEYKEEKSFSFKEITDENFEAMRATYGDDFALLEGIRSIYGYVIIENLLSGHDDLSSAMIAVYDKHKDDLLALKAFIRSERPEDYNKIFKSTDEKSNYVNYIGYTKKGGDKKKVKKCKDDEFYAYIKKYLQGLTDIKDVAARDTFLKDIEDGSFMPKILHSDNGLFPRQINEVELKKILDNMVKSFPATAEIKDKIVTLFNYKIPYYVGPLAGKEETCWAVKKSNEKITPWNFDDVIDKAKSNEKFMLRMTNKCSYLRGEDVLPKASIIYQKFDTLNQLNKLRVNDELLTVDLKQKIFNELFLKYPKVSDKKIIDLLVREGKISQNDRSEVTLSGKDGEFKASMSSYIHLKNILGDFVDKDLSENGGVCENIILWHTLNTDKNIVVDLIKENYGKIPEIKNAIKQLKGLAFHDFGRLSRKLLCEIYTVKEDTGELWNVLDALYETNENLNELLNDEKFSFGRNIKEENGEMTSDVGYKDVEELYVSPAVRRGIWQTLTVVDEYVKAIGKAPDKIFVEVTREDGIKGDAGRTQSRKRRLQEKFRTVSDAYADVIAELGEERFTDLKLRQERLFLYFRQLGRCMYTGERIDLNSINDVTRYDVDHILPRTFIKDDSLDNKVLVLRSKNAKKSDTYPLPAGFSNQRDFWKMLLDKGLIAKVTYDRLTRTEPLREDEYQDFINRQKVITDQTVKVVAELFKRRYPTAKIVYSKAKNVNDFKQKFDLFKCRETNDLHHARDAYLNVVVGNVYDTVFATPMSMYRKDGDVWRTYNLKKLFTRDVKGAWDNAQSIATVKKIYSKNSMIVTRYATCNSGGFYNATVYSKDEKGITAPRKGKGPLSDSSKYGGYMTQPTAYFAIVLSKDKNGNEIKTIEAVPVLTAYMARIDPKAVERYFSERLKDAKIIVPKIKIKQLASYNGTLCCLAGITDNRILVHNAVQLFTDGKTDEYVNSLLKLADMKAKGIINVGQEEFVMKTNRDGERKLVIDRANNADLYGMLKRKLERENYAGLSAFATFRKNLEKGEEKFNSLTVYEQTVVLLQILKFFKCNAETADTTLVGGSAKSGSIKFNNNITNVDFRLIDLSPAGLTERVRKV

SEQ ID NO: 204 - protein, 1336 aa, synthetic construct
  REGION 1..1336: note = MG44-204 effector
MEKFFLGMDIGTNSVGMACTDEKYKLLRAAGRDCWAVRLFDESHTAAERRVARTARRRLERRKQRIGFLQSLFALLIEDKTFFIRLNNSQYSAEDKSAALNGDVNNLFSDDGFKDKDYHKKYPTIFHLRKALMSEPVTDLRLYYLALHHIVKYRGHFLFEGSMAEFHDASKLFEKLNAVCVDLYEERAPLFDTSKVSSAKEILLQRGKDREKRLIEFFAANDGVSKEIIKGICGYKISPQKLFVGRYKEEKSFSAEELSDEAFDALQATFGDDFALLESIRSVCNYITFERLLSGNSDISSAMIALYNKHAADLALLKKYIREHGTQEEYNRFFKFTGENSNYVNYIGYTKKGGDKKKVKICGREEFYRYTKDFLKKLSDDVNEDLERINNEIENKIFLPKILHADNGLFPYQVNEDELKKIIDNMVKNCPQTAGMAKAILPVFLYRIPYYVGPLTGKNSWAVRKEGKENEKVTPWNFKDVIDEAKSNEGFMRKMTGKCSYLYAEDVLPKFSVYYQSYNVLNQLNKLKINDCPISVELKQKIFKELFLTKKKVTDNAIKDLLVRCGKISESEKKSVTISGKDGELNATMSSYIQLKTILGEFADEDLKNGGDVCENIILWHTLNTEKRIVEYLIMKNYGDTPVIAQNIKALKGLVFKDFGRLSKKFLCDIRAVDKETGELLTVTDILYRTNNNLNELLFSEQYNWQEVIRKENGEITDEITYEDIEKLYVSPAVRRGIWQSLKMADEYVRKIGKTPDKIFVEVTREDGVKGEAGRTISRKKQLQEKYKGIEGIADLTAELNEKTDLDLRSERLYLYFRQLGKCMYSGERIDLSTLSTDRYDVDHILPRTYIKDDGLDNKVLVLRSKNAEKTDVYPIPYGLVTAEARKHWQILLKKGLISDTTYKRLTRTEPLNDDDYGDFINRQKTITDQTAKAVIGLMAKKYPSAKMVYSKAKNVSDFKQKFNLHKCREANDLHHARDAYLNIVVGNVYDTCFATPMAMFNKDGDKWRTYNLKTMFTRTVKGAWEQENNQSLLTVKKTYAKTSMSVTQYAYCFNGEFYDQTIYGKEDTGITAPRKLNGPLSDTSGYGGYKSQNTAYFAVVSSKGKKEKTIKTIEAVPVMVSYKAKNDPNFLQRYFESYLQKPVVLIEKLKKKQLVSYNGTLCYLAGVTDERIIVHNAVELFTDNKTDEYVNALGKLSDMEKNGRIDTQQEEYVIKTNRLKEVKLTVNRKDNIALYDYLLEKLNDKRYFGVGSFLSYYRTLLKAKEIFDTLSVLKQAATLLQILRFFKCNAETSDLSTIGGPAKSGKIRINKDITETEFSIIHRSACGLTERRQKV

SEQ ID NO: 205 - protein, 1334 aa, synthetic construct
  REGION 1..1334: note = MG44-205 effector
MKKFYIGADIGTNSVGVACTDESYRLIRAKSKDCWAVRLFDEGETAFDRRTKRTARRRLARRKQRINWLQELFEPFIDDKTFFIRLNNSQYLPEDKDSLLCGNKNNLFENEGEESKFYKKYPTIYHLRKALMDGGNFDIRLYYLALHHIIKYRGHFLYEGSIEDIRDFSNLMKGLDCAIADSYDGGLNLFDSVDSAKVRDILIDKKSGLRDKQVELEKLLCVKSKREKEILKGITGQKISPYVLFGDEFKEEKSFSLNDMSDEEFESKRSSYGESFTLLDLMHSVCNYVKFEKIFEGHSDISSAMISVYEKHKADLVLLKKVVRKQSKEDYNKIFRSVNEEKNYVNYIGYTSKDGRKIKVKKCKGEDFFKYLKKYLNGILNEDNFDIVSKIIKEIDDRIFLPKILHSDNGLFPKQVNEFELKKIIENMVRNYAETEEMASAVLSLFNYKIPYYVGPLTGCNSWVVRTDEKVTPWNFDRVVDLAKSNEAFMRRMTNKCAYIKGEDVLPKASIIYQKYDTLNQLNKLRINDRVISIELKQTIYNELFLKYPKVTDKKIKELLVREGLCSSSETKDITISGKDGDFKSSMSSYIRLKNILGDFVDDDLKSGGKVCENIILWHTLNTDKKIVEDLIEKNYGFIPEIKANIKQLKGLTFNDFGRLSAKLLIGIEGVDKTTGQILTILDVLYQTNQNLNEVLNNESYNFSEIIDEENGIETEIISYETVEELYVSPAVRRGIWQTLLMIDEYVNAVGRQPDKIFIEVTRNDGKKGDNGRTQPRKRQLQEKFKNIGSAYSDIIEELSEEKYTDLKLRQERLYLYFRQLGRCMYTGERIILDELNGNRYDVDHILPRTYVKDDSLDNKVLVCRGANATKADTYPLPTEFSKKEVRAHWKMLLDKDLISKTTYDRLTRIEPLKDDDYNDFINRQKTITDQTSKAVIELLKRKYPDAKLIFSRAKNVSDFKNRFNLFKCRETNDLHHARDAYLNVVVGNVFDTVFSTPLGQSRKDGDVWRIYNLKKLFTRDVIGAWSKDSIKIVKDTYSKPSMSVTRYATCNKGKFYDETVCRKDDSAITAPRKGEGPLSDVTKYGGYTSQKTAYFAIVTSVDKKGKRIKTIEAIPVLVTYKLKTDTNAIQKYLESYLREPVIVIPKVKVKQLVSYNGSLCYLAGITGNQITVHNASQLYTDNDTDEYVNELIKIIGMGDNGMITGNESQYITKTNKDGVIRIVVNKENNEKLYETLKNKLDSKIYKGLSAFASFKTNMERGKDKFCELSVLEQAKVLLQILKVFRCNAKKSNIELIGGGCDSGSIKINKNITDVDFKLVNLSPAGLTVRIRKV

SEQ ID NO: 206 - protein, 1334 aa, synthetic construct
  REGION 1..1334: note = MG44-206 effector
MKKFYIGADIGTNSVGVACTDESYRLIRAKSKDCWAVRLFDEGETAFDRRTKRTARRRLARRKQRINWLQELFEPFIDDKTFFIRLNNSQYLPEDKDSLLCGNKNNLFENEGEESKFYKKYPTIYHLRKALMDGGNFDIRLYYLALHHIIKYRGHFLYEGSIEDIRDFSNLMKGLDCAIADSYDGGLNLFDSVDSAKVRDILIDKKSGLRDKQVELEKLLCAKSKREKEILKGITGQKISPYVLFGDEFKEEKSFSLNDMSDEEFESKRSSYGESFTLLDLMHSVCNYVKFEKIFEGHSDISSAMISVYEKHKADLVLMKKVVRKQSKEDYNKIFRSVNEEKNYVNYIGYTSKDGRKIKVKKCKDEDFFKYLKKYLNGILNEDNFDIVSKIIKEIDDRIFLPKILHSDNGLFPKQVNEFELKKIIENMVRNYAETEEMASAVLSLFNYKIPYYVGPLTGCNSWVVRTDEKVTPWNFDRVVDLAKSNEAFMRRMTNKCAYIKGEDVLPKASIIYQKYDTLNQLNKLRINDRVISIELKQTIYNELFLKYPKVTDKKIKELLVREGLCSSSETKDITISGKDGDFKSSMSSYIRLKNILGDFVDDDLKSGGKVCENIILWHTLNTDKKIVEDLIEKNYGFIPEIKANIKQLKGLTFNDFGRLSAKLLIGIEGVDKTTGQILTILDVLYQTNQNLNEVLNNESYNFSEIIDEENGIETEIISYETVEELYVSPAVRRGIWQTLLMIDEYVNAVGRQPDKIFIEVTRNDGKKGDNGRTQPRKRQLQEKFKNIGSAYSDIIEELSEEKYTDLKLRQERLYLYFRQLGRCMYTGERIILDELNGNRYDVDHILPRTYVKDDSLDNKVLVCRGANATKADTYPLPTEFSRKEVRAHWKMLLDKDLISKTTYDRLTRIEPLKDDDYNDFINRQKTITDQTAKAVIELLKRKYPNAKLIFSRAKNVNDFKNRFNLFKCRETNDLHHARDAYLNVVVGNVFDSVFSTPLGQSRKDGDVWRIYNLKKLFTRDVIGVWSKDSIKIVKDTYSKPSMSVTRYATCNKGKFYDETVCRKDDSAITAPRKGKGPISDVTKYGGYTSQKTAYFAIVTSVDKKGKRIKTIEAIPVLVTYKLKTDTNAIQKYLESYLREPNIVVPKVKVKQLVSYNGSLCYLAGTTDNRITVHNASQLYTDNTTDEYVNELIKIIGMGDNGIITGNESQYITKTNKDGVVRSVVNKENNEKLYETLKNKLDSKIYKGLSAFASFKTNMERGKDKFCELSVLEQAKVLLQILKVFRCNAVNSNIELIGGGRGSGSIKINKNITDVDFKLVNLSPAGLTVRIRKV

SEQ ID NO: 207 - protein, 1217 aa, synthetic construct
  REGION 1..1217: note = MG44-207 effector
MRFALQQSPVDDIRLYYLALHHIIKYRGHFLYDGNVSEVRDVHKLFDALNTVCENTFAENTPHFDIEKADEAKDMLLRSKGKLKETVKSIKQLFSVQNDDCGKIRTEIINGFCGAKFSPEKLLGDAYSEEKSFAFRDVEEDAFEAMQSTYGDDFALLKAMREIYNFVTFERLFNGQPNISSAMIAVYDKHKSDLKKLKGFIKKNYDTDGGKKCREMFSDVSQKANYVNYVGHVGYGKSRKRVKTCDYDSFIAYVKKFLMDGNFAHDETYDEIMAEIEAKTFLPKILHSDNGLVPHQVNEDELVKIVAQMVRAFPETAQMASKILPLFLFRIPYYVGPLVGSNSWAVRKSDEKITPWNFRDVVDEAASNEEFMRRMTNKCTYLHGVDVLPKCSIAYQKFNTLNQINKLKVNDCAISVPLKQKIFAELFLVKPRVSDKMIASLIVREGAVAPGDSVVLSGKDGGDIKASMSSYIQLKRILGDFVDYDLASGGNVCENIILWHTLNTDKRLVEDLIVKNYGDNPAVAPYVKQLKGLVFNDFGKLSGRLLTELDVVDKQTGELCTVTDLLWNTNENFNELMFDKRYNLEEVIAAENEDDNDKVDYREVQKLYVSPAVRRGIWQSLQMVDEYVAALGKEPDKVFVEVSREEGVKGDKGRTHLRKKQLLEKYKNINPKDVENIDELTGELNSDKISDMRLRQERLYLYFRQLGRCMYSGEPIDLDHINDSKLYDVDHILPRSYIKDDSLDNKVLVLRSKNAEKSDTYPLPLGFTNQQGWWKMLRAKDLISSGTYDRLMRTAPLTDDDYNDFINRQKVITDQTSKAVIELLKRKYPSATLVYSKAVNVADFKSKFDLYKCRETNDLHHARDAYLNVVVGNVYSTVFGVRIETYVKDGEKWKTYNLKKMFTRDVPGAWNENSIRTVKGVYNSSSMCVTRYAYCNKGAFYKQTVYSGNENITAPRKGKGPLANMERYGGYMTQSTAYFAIVESQGKKGRIKTIEAVPVMVDYQSRNDPDRVVRYFEENGLVDVKLIVPKIKIKQLVSYNGSRVYLAGVGDVRILVHNATELFVDNKIDDYVNQLLKIVEMAKQPTFNKNSDCYIVKTNRMGDIKLVVDKESNVKLYDELILKLECKQFQGFGAYTSFRNVLKESREKFVDLSTLEQAIVLLEVLKFFKNNADTADLSLIGESKRAGILRFSKNITDVDFRIISQSPCGLTVHVKRV

SEQ ID NO: 208 - protein, 1202 aa, synthetic construct
  REGION 1..1202: note = MG44-208 effector
MSLIKDFDDGLPYKQIKENFETELGVKTKLDKTLASILISGKFKTSDIFDVDKEDAIKIDFNDANFEEQYGEIISSLKDVEVEILTLLQAIYANIQLKKLLGENNYICQAMVERYEKHNKQLQELKKFVKTYFPSKKKIIFNAGHKPSKNGKNENKENTQYNNYAAYCYSDLYSGKKRVLYKKSSQEDFYKFLKSELFECDVENNVELDKYEERKQNILNAIEKNDFLLKLRSNDNILLPNSLYQAELKQILKVSAQKFNFLNNKDADGRSVSQKIIDVVSFRVPYFVGPIGESDNGWIRKDKSADFKPWTLDKIIDLDEAENRFIQNMTNKCTYLPTEDVLPQKSLLYSKFRVLNELNNLKINGNAIAVETKQQIFDGLFKKTPKVSTKKLVEFLKQNNIINKNDSNVVFTGIDKEFANDYSSYVTFATKFGEEFVNKNLEVFEKIIKYHTIISDKSRLAKRIKREFNIFSDEDIKFLKSLNFSGWGSLSQKFLEGLKFSDKKSANPEMETLTVMSALWETNKNLQEIIFCKTYDLQQKLDANIQKIQRDLLYDDIQNMYTSPAVKRGTWQAISIINELKSKLGKYPDKIFVEVTRNNQEKGEAGRKDSRHKMVVKKYKDKQLKLNCQKLCIEFNKLMEELNQKDNSNLRSEKLYLYFMQLGKDIYTGKPIDISQLNNDNMYNVDHIIPRCKVKDDSIDNKVLVSAAANLAKSDNYPVDGHIQASQKAFWELLRENGLMTDSKLARLQRTEEFTEKDADNFTNQQLVSTNQESKAVIDLLSKVYSNKRNIIFSKAMFVSDFRKNFNINKSRNVNALHHAQDAYLNVVVGNVLFNRFTEGYWKKNTQENNNQTADKNANTTSVVEKLFRRTVWSNQTGEVVWKGQPSIDLVRKNCEKNSPCISIMPYENKNGMFYNATVYKSSKNHSATPASFALKAKGPLSSIDKYGGYNSLKNAYFIAVESVGTNGTVNKTIETVPIIVEYQYRNDANKTQKIIDYIEKTNNIKITKVIKDKIKYRSLLKIDGGLYMLTAKTNDSLKLLKLNQWFLSNKDIGYIKILEKYQNMPAAIKELLKTTDEEIIVSPAVKTNSKQLAISRTNNVYLYDLIVAQLGKKIYNLSSISGLVKKLTNARSMFLSLSISAQAELLLGLVKYVGGAYNVDLSLLGESQHAGSTTIGKNISNLNISLIEQSVTGLYAKETVL

SEQ ID NO: 209 - protein, 1167 aa, synthetic construct
  REGION 1..1167: note = MG44-209 effector
MEKFFLGMDIGTNSVGMACTDEKYKLLRAAGRDCWAVRLFDESHTAAERRVARTARRRLERRKQRIGFLQSLFALLIEDKTFFIRLNNSQYSAEDKSAALNGDVNNLFSDDGFKDKDYHKKYPTIFHLRKALMSEPVTDLRLYYLALHHIVKYRGHFLFEGSMAEFHDASKLFEKLKAVCVDLYEERAPLFDTSKVSSAKEILLQRGKDREKRLIELFAANDGVSKEIIKGICGYKISPQKLFVGRYKEEKSFSAEELSDEAFDALQATFGDDFALLESIRSVCNYITFERLLSGNSDISSAMIALYNKHAADLALLKKYIREHGTQEEYNRFFKFTGENSNYVNYIGYTKKGGDKKKVKICGREEFYRYTKDFLKKLSDDVNEDLERINNEIENKIFLPKILHADNGLFPYQVNEDELKKIIDNMVKNCPQTAGMAKAILPVFLYRIPYYVGPLTGKNSWAVRKEGKENEKVTPWNFKDVIDEAKSNEGFMRKMTGKCSYLYAEDVLPKFSVYYQSYNVLNQLNKLKINDCPISVELKQKIFKELFLTKKKVTDNAIKDLLVRCGKISESEKKSVTISGKDGELNATMSSYIQLKTILGEFADEDLKNGGDVCENIILWHTLNTEKRIVEYLIMKNYGDTPVIAQNIKALKGLVFKDFGRLSKKFLCDIRAVDKETGELLTVTDILYRTNNNLNELLFSEQYNWQEVIRKENGEITDEITYEDIEKLYVSPAVRRGIWQSLKMADEYVRKIGKTPDKIFVEVTREDGVKGEAGRTISRKKQLQEKYKGIEGIADLTAELNEKTDLDLRSERLYLYFRQLGKCMYSGERIDLSTLSTDRYDVDHILPRTYIKDDGLDNKVLVLRSKNAEKTDVYPIPYGLVTAEARKHWQILLKKGLISDTTYKRLTRTEPLNDDDYGDFINRQKTITDQTAKAVIGLMAKKYPSAKMVYSKAKNVSDFKQKFNLHKCREANDLHHARDAYLNIVVGNVYDTCFATPMAMFNKDGDKWRTYNLKTMFTRTVKGAWEQENNQSLLTVKKTYAKTSMSVTQYAYCFNGEFYDQTIYGKEDTGITAPRKLNGPLSDTSRYGGYKSQNTAYFAVVSSKGKKEKTIKTIEAVPVMVSYKAKNDPNFLQRYFESYLHQPVVLIEKLKKSNLSVITGRFAIWRA

SEQ ID NO: 210 - protein, 1355 aa, synthetic construct
  REGION 1..1355: note = MG44-210 effector
MKKFYLGMDIGTDSVGIAGTDENYNLLRARGKDLWAVRLFDEAKDASARRMKRTARRRLQRRKQRIEWLQELFAPYIEDKCFFLRLNNSGFEKEDKHESLQSQYSLFADAGYTDREFYKKYPTIFHLRRALAERASEEKTDLRLYYLALHHIVKYRGHFLFEGDSISDIRDIKKLFEEFNAVAEDIFPEGDIRLPLEKAEAFRALALSAKGIRDKKKTGEELFETNSPALAELVGLLLGAKAKIGVIFGEEYGEYKEEKLSFKEILDEDFEAKQELYGDNYPLLEAARSIYNYFVFEKILDGNHCISAAMVAVYERHRRDLRLLKNFVKTQFSKEIYYKIFRSEKEAANYCNYISYTKTEKKKIFVKKCKYGDFCKFLKKTLTENRDCVKDKKTLDDILFKIENGDFLPKILNADNGLFPHQINGAELDKILANLCKEYPCFAEKEADGFSVAEKIRKIFLFKIPYYVGPLNNYHEENGNSWVVRKSGKITPWNFEDMVDTASSNEKFIRRMTNKCSYLYGKDVLPKCSMYYQAFDVLNQLNKIKFNEQPISVEMKQELFHSLFLRHRKVTKKLIKEYLTATGKYTSAEAKELSVSGFDGELKANMGAYITLKNCLGDYVDEHPETCENIILWHTLNTDKTIVERQILSHYGDVPVIKEKIKALKGITSFKEFGRLSKELLCELIGGEDPVTGEVYTILNRLYHTNFNFNELLFSDTYRFNSAIEAMNAGKDGDVGYDDVKELYVSPMVRRGIWQALTMADEYVQAVGRVPDKIFIEVTRQGDEKKKPTVSRKNQLLENYKGLGQDCRNIDELLTELNDKTDSQLRQERLYLYFKQLGRCAYTGQLIRLEELNGDLYDVDHIMPRSITKDDSLENKVLVRREKNAQKSDEYPLPAGFTDQQRFWKLLRDKGLMSEKKYALLTRTKPLTEDDFRDFINRQLVVTNQTVKAVAELLKRKYGEKGTRIVYSKAKNVDGFKNQYDIVKCRETNDLHHARDAYLNIVVGNVYDTKFTSAYDYYYRKGDAWREYNLKTLFERPVKDAWIGREGSAFVKDVLRKPSMQITRYAYTNKGEFYNETIYGKDDKGISAPRKSIEPYNKTEKYGGYKSLTTAYFSVVESKDKKGKLIKTVEAIPVLVDYQSKGDREAVLAYLSRIGLKEPKLLLPKIKIKSLVSVNGFKVWLAGTTGVQLILHNAQQWFTDEKTDLYIKNLGKLVEWERTGKIAEEEKARETFSMIKNRKEEVSLLIDRSQNVALYREIVAKLQTKLYQGLSAVRSFAEKLSAKEEIFVSLSVLEQAKVLLQIARFMKCNAEAADLSLLKDGSRCGILLIGKNITDVDFAVIHQSPCGINTYIQRV

SEQ ID NO: 211 - protein, 1347 aa, synthetic construct
  REGION 1..1347: note = MG44-211 effector
MEKEQKFYLGLDIGTNSVGIACTDENYNLLRVKGKDCWAVRLFDEAQTAADRRTARTARRRLQRRRYRINQLQGLFAPFMQDNLFFLRLNNSQFFADDKAGELDGDVNNLFADSGFTDRNFHEKYPTIYHLRFALQQSPVDDIRLYYLALHHIIKYRGHFLYDGNISEVRDVHKLFDALNTVCENTFAENTPHFDIEKADEAKDMLLRSKGKLKDTVKSIKQLFSVQNDDCGKIRTEIINGFCGAKFSPEKLLGDAYSEEKSFAFRDIEEDAFEAMQSTYGDDFALLKAMREIYNFVTFERLFNGQPNISSAMIAVYDKHKSDLKKLKGFIKKNYDTDGGKKCREMFSDVTQKANYVNYVGHVGYGKSRKRVKTCDYDSFIAYVKKFLMDGNFAHDETYDEIMAEIEAKTFLPKILHSDNGLVPHQVNEDELVKIVAQMVRAFPETAQMASKILPLFLFRIPYYVGPLVGSNSWAVRKSDEKITPWNFRDVVDEAASNEEFMRRMTNKCTYLHGVDVLPKCSIAYQKFNTLNQINKLKVNDCAISVPLKQKIFAELFLVKPRVSDKMIASLIVREGAVAPGDSVVLSGKDGGDIKASMSSYIQLKRILGDFVDYDLASGGNVCENIILWHTLNTDKRLVEDLIVKNYGDNPAVAPYVKQLKGLVFNDFGKLSGRLLTELGVVDKQTGELCTVTDLLWNTNENFNELMFDKRYNLEEVIAAENNDDDGKVDYEDVQKLYVSPAVRRGIWQSLQMVDEYVAALGKEPDKVFVEVSREEGVKGDKGRTHSRKKQLLEKYKNINPQDVENIDELTGELNSDKISDMRLRQERLYLYFRQLGRCMYSGEPIDLDHINDSKLYDVDHILPRSYIKDDSLDNKVLVLRSKNAEKSDTYPLPLGFTNQQGWWKMLRAKDLISSGTYDRLMRTAPLTDDDYNDFINRQKVITDQTSKSVIELLKRKYPNATLVYSKAVNVADFKSKFDLYKCRETNDLHHARDAYLNVVVGNVYSTVFGVRIETYVKDGEKWKTYNLKKMFTRDVPGAWNENSIRTVKGVYNSSSMCVTRYAYCNKGAFYKQTVYSGNENITAPRKGKGPLANMERYGGYMTQSTAYFAIVESQGKKGRIKTIEAVPVMVDYQSRNDPDRVVKYFEENGLVDVKLIVPKIKIKQLVSYNGSRVYLAGVGDVRILVHNATELFVDNKIDDYVNQLLKIVEMAKQPTFNKNSDCYIVKTNRMGDIKLVVDKGSNVKLYDELILKLECKQFQGFGAYTSFRNVLTESREKFVDLSTLEQAIVLLEVLKFFKNNADTADLSLIGESKRAGILRFSKNITDVDFRIISQSPCGLTVHVKRV

SEQ ID NO: 212 - protein, 1337 aa, synthetic construct
  REGION 1..1337: note = MG44-212 effector
MEKFFLGMDIGTNSVGMACTDEKYKLLRAAGRDCWAVRLFDESHTAAERRVARTARRRLERRKQRIGFLQSLFALLIEDKTFFIRLNNSQYSAEDKSAALNGDVNNLFSDDGFKDKDYHKKYPTIFHLRKALMSEPVTDLRLYYLALHHIVKYRGHFLFEGSMAEFHDASKLFEKLNAVCVDLYEERAPLFDTSKVSSAKEILLQRGKDREKRLIEFFAANDGVSKEIIKGICGYKISPQKLFVGRYKEEKSFSAEELSDEAFDALQATFGDDFALLESIRSVCNYITFERLLSGNSDISSAMIALYNKHAADLALLKKYIREHGTQEEYNRFFKFTGENSNYVNYIGYTKKGGDKKKVKICGREEFYRYTKDFLKKLSDDVNEDLERINNEIENKIFLPKILHADNGLFPYQVNEDELKKIIDNMVKNCPQTAGMAKAILPVFLYRIPYYVGPLTGKNSWAVRKEGKENEKVTPWNFKDVIDEAKSNEGFMRKMTGKCSYLYAEDVLPKFSVYYQSYNVLNQLNKLKINDCPISVELKQKIFKELFLTKKKVTDNAIKDLLVRCGKISESEKKSVTISGKDGELSVTMSSYIQLKTILGEFADEDLKNGVGVCENIILWHTLNTEKRIVEYLIMKNYGDTPVIAQNIKALKGLVFKDFGRLSKKFLCDIRAVDKETGELLTVTDILYRTNNNLNELLFSEQYNWQEVIRKENGEITDEITYEDIEKLYVSPAVRRGIWQSLKMADEYVRKIGKTPDKIFVEVTREDGVKGEAGRTISRKKQLQEKYKGIEGIADLTAELNEKTDLDLRSERLYLYFRQLGECMYSGERIEDLSTLSTDRYDVDHILPRTYIKDDGLDNKVLVLRSKNAEKTDVYPIPYGLVTAEARKHWQILLKKGLISDTTYKRLTRTEPLNDDDYGDFINRQKTITDQTAKAVIGLMAKKYPSAKMVYSKAKNVSDFKQKFNLHKCRETNDLHHARDAYLNIVVGNVYDTCFATPMAMFNKDGDKWRTYNLKTMFTRTVKGAWEQENNQSLLTVKKTYAKTSMSVTQYAYCFNGEFYDQTIYGKEDTGITAPRKLNGPLSDTSGYGGYKSQNTAYFAVVSSKGKKEKTIKTIEAVPVMVSYKAKNDPNFLQRYFESYLQKPVVLIEKLKKKQLVSYNGTLCYLAGVTDERIIVHNAVELFTDNKTDEYVNALGKLSDMEKNGRIDTQQEEYVIKTNRLKEVKLTVNRKDNIALYDYLLEKLNDKRYFGVGSFLSYYRTLLKAKEIFDTLSVLKQAATLLQILRFFKCNAETSDLSTIGGPAKSGKIRINKDITETEFSIIHRSACGLTERRQKV

SEQ ID NO: 213 - protein, 1336 aa, synthetic construct
  REGION 1..1336: note = MG44-213 effector
MEKFFLGMDIGTNSVGMACTDEKYKLLRAAGRDCWAVRLFDESHTAAERRVARTARRRLERRKQRIGFLQSLFALLIEDKTFFIRLNNSQYSAEDKSADLNGDVNNLFSDDGFKDKDYHKKYPTIFHLRKALMSEPVTDLRLYYLALHHIVKYRGHFLFEGSMAEFHDASKLFEKLNAVCVDLYEERAPLFDTSKVSSAKEILLQRGKDREKRLIEFFAANDGVSKEIIKGICGYKISPQRLFVGRYKDEKSFSTEELSDEAFDALQATFGDDFALLESIRSVCNYITFERLLSGNSDISSAMIALYNKHAADLALLKKYIREHGTQEEYNRFFKFTGENSNYVNYIGYTKKGGDKKKVKICGREEFYRYTKDFLKKLSDDVNEDLERINNEIENKIFLPKILHADNGLFPYQVNEDELKKIIDNMVKNCPQTAGMAKAILPVFLYRIPYYVGPLTGKNSWAVRKEGKENEKVTPWNFKDVIDEAKSNEGFMRKMTGKCSYLYAEDVLPKFSVYYQSYNVLNQLNKLKINDCPISVELKQKIFKELFLTKKKVTDNAIKDLLVRCGKISESEKKSVTISGKDGELNATMSSYIQLKTILGEFADEDLKNGGGVCENIILWHTLNTEKRIVEYLIMKNYGDTPVIAQNIKALKGLVFKDFGRLSKKFLCDIRAVDKETGELLTVTDILYRTNNNLNELLFSEQYNWQEVIRKENGEITDEITYEDIEKLYVSPAVRRGIWQSLKMADEYVRKIGKTPDKIFVEVTREDGVKGEAGRTISRKKQLQEKYKGIEGIADLTAELNEKTDLDLRSERLYLYFRQLGKCMYSCERIDLSTLSTDRYDVDHILPRTYIKDDGLDNKVLVLRSKNAEKTDVYPIPYGLVTAEARKHWQILLKKGLISDTTYKRLTRTEPLNDDDYGDFINRQKTITDQTAKAVIGLMAKKYPSAKMVYSKAKNVSDFKQKFNLHKCRETNDLHHARDAYLNIVVGNVYDTCFATPMAMFNKDGDKWRTYNLKTMFTRTVKGAWEQENNQSLLTVKKTYAKTSMSVTQYAYCFNGEFYDQTIYGKEDTGITAPRKLNGPLSDTSGYGGYKSQNTAYFAVVSSKCNKEKTIKTIEAVPVMVSYKAKNDPNFLQRYFESYLHQPVVLIEKLKKKQLVSYNGTLCYLAGVTGKQIIVHNAVELFTDNKTDEYVNALGKLSDMEKNGRIDTQQEEYVIKTNRLKEVKLTVNRKDNIALYDYLLEKLNNKRYFGVGSFLSYYRTLLKAKEIFDTLSVLKQAATLLQILRFFKCNAETSDLSTIGGPNRSGTIRINKDITETEFSIIHRSACGLTERRQKV

SEQ ID NO: 214 - protein, 1333 aa, synthetic construct
  REGION 1..1333: note = MG44-214 effector
MEKFYLGMDIGTNSVGMACTDENYKLLRAKGKDCWSVRLFDESKTALERRTYRTSRRRLQRRKYRLALLQELFAPFIDDKNFFIRLNNSQFLPEDKDGALFGDKNNLFNDPALDDKTFHGQFPTIYHLRKALLDGGDYDLRLYYLALHHIIKYRGHFLFEGSMNDIRNINRLFTALNDTLKNVYGDDEAPEFAATSAEKAKEILLDPKKNIRDKEQELEKLFGAESKLEKEIIKGMCGAKISPSVLFGESFKEEKSFSFKELTDETFDAMRQTYGDNFALPEALRAIYSFVTFEKLLVGKPDISSAMIAVYEKHKSDLKLLKDFLRAESGEIYGKVFKNTNEKANYVNYVGYTKKGGDKKKVKTCGYEEFRQYLKKTIAAIDAKDKKTQNLILSELENGSFLPKILHSDNGLFPHQVNEDELVKIADNMAKNHPETTDMAKKLRKLFLFRVPYFVGPLAGENSWAMRKTDEKVTPWNFDDVIDKAASNEEFMRRMTNHCSILHAEDVLPKCSMIYQKYNVLNQLNKLKINDCPLPSVELKQKIFNELFLKYNKVSDKKIIDLLVRSGEVSSEEARTITLTGKDGELNASMSSYITFKNILGDFADKPENAEILEKIILWHTLNTDKKIVEDLILKHFGKIPEIKNNVKALKGLVFKDFGRLSEKLLTGLKAADKETGELLSIIDILYETNQNLNEILANERYNFAELIKAENGEESDEIGYKDIEELYVSPAVRRGIWQSLIMADEYINAVGKVPDRIFIEFTRTDETKGEAGKKLSRKKQLSDKFKAIKDAEFQDIIAELNSDEITDMKLRQERLYLYFRQLGKCMYSGKNIDLSLLNTDTYDVDHILPRSYTKDDSLDNKALVLRDCNAKKTDIYPVPAEFRQVKLWKLLHEKELISKKTFDRLMRTEPLGEGDYEDFINRQKVITDQTAKAVAELLQKKYPTSQIVYSKAKNVVDFKNKFSLYKCRETNNLHHARDAYLNIVVGNVYHTCFSTPMAMFYKKDDGWRENNLKTMFTRNVKGAWDENSLQLVQSTFKKHTIAVSQYAFCYNGMFYDQTVYPKSDPGITAPRKGNGALADVEKYGGYKSQKTSYFAIVQSKGKKGQTIKTIEAVPVLTAYRQRTNPDALLDYFKTYLTEPTILIPKLKVRQLVSYNGTPVYIAGVTDNQIGVNNATELFTDNKTDEYVNQLSKLVEMAKNGTISEENGEYIIKTNRNKDVKLTINRQSNIELYDTLKNKLSKPSYQGLSPFSTFRKNLESGEEKFANLSVADQCTVLLQILKFFKCNADTADISLIGGGETCGRIRFNKDISKVNFEIVCKSPAGLTERIKKV

SEQ ID NO: 215 - protein, 1333 aa, synthetic construct
  REGION 1..1333: note = MG44-215 effector
MEKFYLGMDIGTNSVGMACTDENYKLLRAKGKDCWSVRLFDESKTALERRTYRTSRRRLQRRKYRLALLQELFAPFIDDKTFFIRLNNSQFLPEDKDGALFGDKNNLFNDPALDDKTFHGQFPTIYHLRKALIDGGDYDLRLYYLALHHIIKYRGHFLFEGSMNDIRNINRLFTALNDTLKNVYGDDEAPEFAATSAEKAKEILLDPKKNIRDKEQELEKLFGAESKLEKEIIKGMCGAKISPSVLFGESFKEEKSFSFKELTDETFDAMRQTYGDNFALPEALRAIYSFVTFEKLLVGKPDISSAMIAVYEKHKSDLKLLKDFLRAESGEIYGKVFKNTNEKANYVNYVGYTKKGGDKKKVKTCGYEEFRQYLKKTIAAIDAKDKETQNLILSELENGSFLPKIHHSDNGLFPHQVNEDELVKIADNMAKNHPETTDMAKKLRKLFLFRVPYFVGPLAGENSWAVRKTDEKVTPWNFDDVIDKAASNEEFMRRMTNHCSILHAEDVLPKCSIIYQKYNVLNQLNKLKINDCPLPSVELKQKIFNELFLKYNKVSDKKIIDLLVRSGEVSPEETRAITLTGKDGELNASMSSYITFKNILGDFADKPENAEILEKIILWHTLNTDKKIVEDLILKHFGKIPEIKNNVKALKGLVFKDFGRLSEKLLTGLKAADKETGELLSIIDILYETNQNLNEILANERYNFAELIKAENGEESDEIGYKDIEELYVSPAVRRGIWQSLIMADEYINAVGKVPDRIFIEFTRTDETKGEAGKKLSRKKQLSDKFKAIKDAEFQDIIAELNSDEITDMKLRQERLYLYFRQLGKCMYSGKNIDLSLLNTDTYDVDHILPRSYTKDDSLDNKVLVCRTCNAKKDDHYPVPSELRQVKLWKLLHEKGLISKKTFDRLMRTEPLGEGDYEDFINRQKVITDQTAKAVAELLQRKYPKTQIVYSKAKNVVDFKNKFGLYKCRETNNLHHARDAYLNIVVGNVYHTCFSTPMAMFYKKDDGWRENNLKTMFTRNVKGAWDENSMQLVKSTFGKHTMAVSQYAFCYNGMFYDQTVYPKGDPGITAPRKGNGALADVEKYGGYKSQKTSYFAIVQSKGKKGQTIKTIEAVPVLTAYRQRTNPDALLDYFKTYLTEPTILIPKLKVRQLVSYNGTSIYIAGITGNQIIAHNATELFTDNKTDEYVNQLSKLVEMAKNGTISEENGEYIIKTNRNKDVKLTINRQSNIELYDTLKDRLSKPIYQGLSPFSTFRKNLESGEEKFANLSVTDQCTVLLQILKFFKCNAETADIVLIGGSSGSGSIKFNKDISDIDFEIICKSPAGLTERIKKV

SEQ ID NO: 216 - protein, 1333 aa, synthetic construct
  REGION 1..1333: note = MG44-216 effector
MEKFYLGMDIGTNSVGMACTDENYKLLRAKGKDCWSVRLFDESKTALERRTYRTSRRRLQRRKYRLALLQELFAPFIDDKTFFIRLNNSQFLPEDKDGALFGDKNNLFNDPALDDKTFHGQFPTVYHLRKALIDGGDYDLRLYYLALHHIIKYRGHFLFEGSMNDIRNINRLFTALNDTLKNVYGDDEAPEFAATSAEKAKEILLDPKKNIRDKEQELEKLFGAESKLEKEIIKGMCGAKISPSVLFGESFKEEKSFSFKELTDETFDAMRQTYGDNFALPEALRAIYSFVTFEKLLVGKPDISSAMIAVYEKHKSDLKLLKDFLRAESGEIYGKVFKNTNEKANYVNYVGYTKKGGDKKKVKTCGYEEFRQYLKKTIAAIDAKDKETQNLILSELENGSFLPKILHSDNGLFPHQVNEDELVKIADNMAKNHPETTDMAKKLRKLFLFRVPYFVGPLAGENSWAVRKTDEKVTPWNFDDVIDKAASNEEFMRRMTNHCSILHAEDVLPKCSMIYQKYNVLNQLNKLKINGCPLPSVELKQKIFNELFLKYNKVSDKKIIDLLVRSGEVSPEEARAITLTGKDGELNASMSSYITFKNILGDFADKPENAEILEKIILWHTLNTDKKIVEDLILKHFGKIPEIKNNVKALKGLVFKDFGRLSEKLLTGLKAADKETGELLSIIDILYETNQNLNEILANERYNFAELIKAENGEESDEIGYKDIEELYVSPAVRRGIWQSLIMADEYINAVGKVPDRIFIEFTRTDETKGEAGKKLSRKKQLSDKFKAIKDAEFQDIIAELNSDEITDMKLRQERLYLYFRQLGKCMYSGKNIDLSSLDTDNYDVDHILPRSYTKDDSLDNKALVLRDCNAKKADHYPVPSDLRQVKLWKLLHEKELISKKTFDRLMRTEPLGEGDYEDFINRQKVITDQTAKAVAELLQKKYPTSQIVYSKAKNVVDFKNKFGLYKCRETNNLHHARDAYLNIVVGNVYHTCFSTPMAMFYKKDDGWRENNLKTMFTRNVKGAWDENSLQLVKSTFEKHTMAVSQYAFCYNGMFYDQTVYPKGDPGITAPRKGSGALADVEKYGGYKSQKTSYFAIVQSKGKKGQTIKTIEAVPVLTAYRQKTNPDALLDYFKTYLTEPTILIPKLKVRQLVSYNGTPIYIAGITGNQIIAHNATELFTDNKTDEYVNQLSKLVEMAKNGTISEENGEYIIKTNRNKDVKLTINRQTNIELYDTFKNRLLKSNFQGLPSFSTFRKNLENGENNFVNLSLTDQCSVLLQLLKFFKCNAETADISLIGGGGRSGTLYLNKDISKVDFEIICKSPAGLTERIKKV

SEQ ID NO: 217 - protein, 1352 aa, synthetic construct
  REGION 1..1352: note = MG46-1 active effector
MKENYYLGLDIGTNSVGYAVTDGGFNLLKYKGEPMWGSHVFEEGKQCSDRRMHRTARRRLDRRQQRVHLTQEIFAKAISEVDERFFVRLKESALFREDTSGRDTYIFFQDENYTDKEYHRDYPTIHHLIKELMEDTTPHDVRLVYLAVAWLMAHRGHFLSEVNKDNITELLDFDSIYGNLMELFTTPPWICSDKEEFKNILLLHQTIKNKERKFWGLLYEGKKPKTDEEDYINKEGMIRLLSGGTVEAGKLFNQKEFQEKISISLKKSEEDFQLLLDEMDEEDSEYLIRLRALYDWALLVDSLHGCSSISEAKVQDYAQHEADLKMLKNFVRKYCPNEYAAIFKNAEKENYASYVYNIPKGKRTKEYKKKITQEEFCDYLKKKLKDIQIEEEDQEIYQDMMFRLETYTFMPKQVTGDNRVIPYQLYYDELKKILENAENYLPFLKKVDEQGISNKTKLLSIFEFRIPYYVGPLCSASKYAWLKRKAEGKIYPWNFEEKVDLDQSEKAFINRMTNNCSYLPGETVLPQNSLLYCKFTVLNEINNIKINGIPISVECKQEIYRLFEENKKVTVDKIKKYLISNNYMEKEDVLGGIDITIKSSLKPQHDFKRLLHSKILNEKEVEQIIECITYSEEKSRVLRRLEREFPKLSDEDRRYLSKLKYSGFGRLSREFFTGIHGANKETGESFSIIQALWDTNDNLMQLLSDRYTFKDSIEEEQRQYYEEHPMTVESLLEEMYVSNAVKRPIYRTLDVIKDIQSVCKAAPKKIYIEMARGQEEGSNRKRSRKDQILELYKNMDKGEVRELSKQLEDCSDRELRSEVLFLYFMQLGRSMYSGKPIDIEKLKTNAYDVDHIYPQCRVKDDSLSNKVLVLSEENRAKGDKYPISAVIRQNMGEMWRVYHEKGLISDEKYRRLTRVSAFSNAEKMEFINRQLVETRQSTKALTRIFRYIFPETEIVFVKAGLVSDFRNEVLKCAKSRIVNDLHHAKDAYLNIVAGEVYHARFTSKFFKIDQDEYSVKTKAIFGNKVWNGKELVWDGEKDIARVKKILTKNSVHYTRYAFERKGGLFDQQPLRAASGLIERKAGLDTEKYGGYNKSTASYFLLVKYAEAGKKPKQDVMFVPIDLMESEQIIKSESYAKYYVRNAIAHIIGKSREIVQEVSFPLGMRKMKVNTLLTLDGFEAILASKSNGGKTLVFGSMMPLFVNNKKEIYIKRLESFSKKKKQNNFLFVDEVYDKITKEENRELFLFLTNKVEEEPYCLIFGSQLQVLHDKENEFENLNLEQQVETLLNLLSIFKTGRTTGCDLKLLGGAGQAGIFTESSKLSNWKKSYKDVRIVDISAAGLHRKTSQNLLELL

SEQ ID NO: 218 - protein, 1352 aa, synthetic construct
  REGION 1..1352: note = MG46-2 effector
MKENYYLGLDVGTNSVGYAVTDGRFNLLKYKGEPMWGSHVFEEGKQCSDRRMHRTARRRLDRRQQRVHLTQEIFAKAISEVDERFFIRLKESALFREDTSRRDTYIFFQDENYTDKEYHRDYPTIHHLIKELMEDTTPHDVRLVYLAVAWLMAHRGHFLSEVNKDNITELLDFDSIYGNLMGLFTTSPWIVSDKEEFKNILLLHQTVKNKERKFWELLYDGKKPKTNEEDYINKEGIIRLLSGGTVEAGKLFNQKEFQEKISISLKKSEEDFQLLLDEMDEEESEYLIRIRALYDWALLVDSLHGCSSISEAKVQDYTQHESDLKMLKNFVRKYCPNEYAAIFKNAEKENYASYVYNISKEKRTKEYKKKITQEEFCDYLKKKLKDMQIEKEDQEIYQDMMLRVETYTFMPKQVTGDNRVIPYQLYYDELKKILENAENYLPFLKEEDEQGISNKTKLLSIFEFRIPYYVGPLCSASKYAWLKRKSEGKIYPWNFEEKVDLDQSEEAFINRMTNNCSYLPGETVLPQNSLLYCKFTVLNEINNLKINGIPISVECKQEIYRLFEENKKVTVDKIKKYLICNNYMKKEDVLGGIDVTIKSSLKPHHDFKRLLHLGILNEREVERIIECLTYSEEKSRVLRRLEREFPKLSDEDRKYLSKLKYSDFGRLSREFFTGIRGANKETGESFNIIQALWNTNDNLMQLLSDRYTFKDSIEEEQHKYYEEHPMTVESLLEEMYVSNAVKRPIYRTLDIVKDIQSVCKTAPKKIYIEMARGQEEGSNRKKSRKDQILELYKNMDKGEVRELSKQLEDCSERELRSEVLFLYFMQLGRSMYSGKPIDIEKLKTNAYDVDHIYPQCRVKDDSLSNKVLVLSEENRAKGDKYPISTKIRQNMGEMWRVYHEKELISDEKYRRLTRESAFSNTEKMEFINRQLVETRQSTKALTRILQYIFPETEIVFVKAELVSDFRNEVLKCAKSRIVNDLHHAKDAYLNIVTGEVYHARFTSKFFKIDQDEYSVKTKAIFGNKVWNGKELVWGGGKDITRVKKTLTKNSVHYTRYAFERKGGLFDQQPLRAASGLIERKVGLDTEKYGGYNRSTASYFLLVKYMEAGKKPKQDVMFVPIDLMESERIIKNESYAKDYVRNAIAQIIGKSREVVQEVSFPLGMRKIKVNTLLIFDGFEAILASKSNGGKTLVFGSMMPLFVASKKESYIKRLESFSKKKKQNNSLFVDEVYDKITKEENRELFLFLTNKIEEAPYCLIFGSQLQVLHDKENEFENLNLEQQVETLLNILSIFKTGRTTGCDLKSLGGVGQAGIFTESSKLSNWKKSYEDVRIVDISAAGLHRKISQNLLELL

SEQ ID NO: 219 - protein, 462 aa, synthetic construct
  REGION 1..462: note = MG46-3 effector
MADMWRAYHERGLISGEKYQRLTRKTSFSNTEKMEFINRQLVETRQSTKAVTRILQYVFPETEIVFVKAGLVSDFRNQVLESVKSRSVNDLHHAKDAYLNIVAGEVYHARFTTKFFKIDQDEYSVKTKVIFGNKVWRGIELVWNGGKDIARVKKVLSKNSVHYTRYAFERKGGLFDQQPLRAAAGLIERKGGLDTEKYGGYNKSTASYFLLAKYTETGKKPKKDVMFVPIDLMETKRIIGNKTYAEEYVGRTIAQIIGKPRETVQEVSFPLGMRKLKANTLLALDGFEATLASKSAGGKQLVFGSMMPLIVDSEKERYIKRLESFSKKKKQSKELYVEETYDKITKAENSSMYSFFESKLKIKPYGAIFGDQLKVLEKGEDQFEKLTLEEQVEALLNILSVFQTGRTTGCDLRLIGGGATVGRMYNNAKLSNWKKSYRDVRIIDISAAGLHRKISQNLLELL

SEQ ID NO: 220 - protein, 928 aa, synthetic construct
  REGION 1..928: note = MG46-4 effector
MEDTTPRDVRLVYLAVAWLMSHRGHFLSEVNKDNISALLDFDLIYEKFMELFLVPPWVCHDREQFQSVLLSHQTVKNKERKFWDLLYNGKKPKVEEEDCVSKEGIIKLLSGGSVEAGKLFNQKEFQEKISISLKKSEEDFQLLLDEMDEEDSEYLIRLRALYDWALLVDSLHGCSSISEAKVQDYAQHEADLKMLKNFVRKYCPNEYAAIFKNAEKENYASYVYNIPKGKRTKEYKKKITQEEFCDYLKKKLKDIQIEEEDQEIYQDMMFRLETYTFMPKQVTGDNRVVPYQLYYDELKKILENAENYLPFLKKVDEQGISNKTKLLSIFEFRIPYYVGPLCSASKYAWLKRKAEGKIYPWNFEEKVDLDQSEKAFINRMTNNCSYLPGETVLPQNSLLYCKFTVLNEINNIKINGIPISVECKQEIYRLFEENKKVTVDKIKKYLISNNYMEKEDVLGGIDITIKSSLKPQHDFKRLLHSKILNEKEVEQIIECITYSEEKSRVLRRLEREFPKLSDEDRRYLSKLKYSGFGRLSREFFTGIHGANKETGESFSIIQALWDTNDNLMQLLSDRYTFKDSIEEEQRQYYEEHPMTVESLLEEMYVSNAVKRPIYRTLDVIKDIQSVCKAAPKKIYIEMARGQEEGSNRKRSRKDQILELYKNMDKGEVRELSKQLEDCSDRELRSEVLFLYFMQLGRSMYSGKPIDIEKLKTNAYDVDHIYPQCRVKDDSLSNKVLVLSEENRAKGDKYPISAVIRQNMGEMWRVYHEKGLISDEKYRRLTRVSAFSNAEKMEFINRQLVETRQSTKALTRIFRYIFPETEIVFVKAGLVSDFRNEVLKCAKSRIVNDLHHAKDAYLNIVAGEVYHARFTSKFFKIDQDEYSVKTKTIFGNKVWNGKELVWDGEKDIARVKKILTKNSVHYTSTANNK

SEQ ID NO: 221 - protein, 131 aa, synthetic construct
  REGION 1..131: note = MG46-5 effector
MKENYYLGLDIGTNSVGYAVTDGGFNLLKYKGEPMWGSHVFEEGKQCSDRRMHRTARRRLDRRQQRVHLTQEIFAKAISEVDERFFIRLKESALFREDTSGRDTYLFFKMKIIRIKSITKTIQQFIISLKN

SEQ ID NO: 222 - protein, 283 aa, synthetic construct
  REGION 1..283: note = MG46-6 effector
MRAASGLIERKAGLDTEKYGGYNKSTASYFLLVKYAEAGKKPKQDVMFVPIDLMESEQIIKSESYAKYYVRNAIAHIIGKSREIVQEVSFPLGMRKMKVNTLLTLDGFEAILASKSNGGKTLVFGSMMPLFVNNKKEIYIKRLESFSKKKKQNNFLFVDEVYDKITKEENRELFLFLTNKVEEEPYCLIFGSQLQVLHDKENEFENLNLEQQVETLLNLLSIFKTGRTTGCDLKLLGGAGQAGIFTESSKLSNWKKSYKDVRIVDISAAGLHRKTSQNLLELL

SEQ ID NO: 223 - protein, 459 aa, synthetic construct
  REGION 1..459: note = MG46-7 effector
MWRVYHEKGLISDEKYRRLTRVSAFSNAEKMEFINRQLVETRQSTKALTRIFRYIFPETEIVFVKAGLVSDFRNEVLKCAKSRIVNDLHHAKDAYLNIVAGEVYHVRFTSKFFKIDQDEYSVKTKAIFGNKVWNGKELVWDGEKDIARVKKILTKNSVHYTRYAFERKGGLFDQQPLRAASGLIERKAGLDTEKYGGYNKSTASYFLLVKYAEAGKKPKQDVMFVPIDLMESEQIIKSESYAKDYVRNAIAHIIGKSREIVQEVSFPLGMRKMKVNTLLTFDGFEAILASKSNGGKTLVFGSMMPLFVNNKKEIYIKRLESFSKKKKQNNFLFVDEVYDKITKEENRELFLFLTNKVEEEPYCLIFGSQLQVLHDKENEFENLNLEQQVETLLNLLSIFKTGRTTGCDLKLLGGAGQAGIFTESSKLSNWKKSYKDVRIVDISAAGLHRKTSQNLLELL

SEQ ID NO: 224 - protein, 867 aa, synthetic construct
  REGION 1..867: note = MG46-8 effector
MKENYYLGLDIGTNSVGYAVTDGGFNLLKYKGEPMWGSHVFEEGKQCSDRRMHRTARRRLDRRQQRVHLTQEIFAKAISEVDERFFVRLKESALFREDNSGRDTYLFFQDENYTDKEYHKDYPTIHHLIKELMENTKPHDVRLVYLAVAWLMAHRGHFLSEVNKDNITELLDFDSIYGNLMELFTTPPWICFDKEEFKNILLLHQTIKNKERKFWGLLYEGKKPKTDEEDYINKEGIIKLLSGGSVEAGKLFNQKEFQEKISISLKKSEEDFQLLLDEMDEEDSEYLIRLRELYDWALLVDSLHGCSSISEAKVQDYAQHEADLKMLKNFVRKYCPNEYAAIFKNAEKENYASYVYNIPKGKRTKEYKKKITQEEFCDYLKKKLKNMQIDEEDEEIYQDMMFRLETYTFMPKQVTGDNRVIPYQLYYDELKKILENAENYLPFLKEVDGQGISNKTKLLSIFEFRIPYYVGPLCSASKYAWLKRKAEGKIYPWNFEEKVDLDQSEKEFINRMTNNCSYLPGETVLPQNSLLYCKFTVLNEINNLKINGIPISVECKQEIYRLFEENKKVTVDKIKKYLISNNYMKKEDVLGGIDITIKSSLKPQHDFKRLLHSKILNEKEVEQIIECITYSEEKSRVLRRLEREFPKLSDEDRRYLSKLKYSGFGRLSREFFTGIHGANKETGESFSIIQALWDTNDNLMQLLSDRYTFKDSIEEEQRQYYEEHPMTVESLLEEMYVSNAVKRPIYRTLDVIKDIQSVCKAVPKKIYVEMARGQEEGSSRKKSRKDQILELYKDMDKGEVRELSKQLEDCSERELRSEVLFLYFMQLGRSMYSGKPIDIEKLKTDVWEKCGEYIMKKDLFQMKNIVV

SEQ ID NO: 225 - protein, 1352 aa, synthetic construct
  REGION 1..1352: note = MG46-9 effector
MKENYYLGLDIGTNSVGYAVTDGKFNLLKYKGEPMWGAHVFEEGKQCSDRRMHRTARRRLDRRQQRVHLTQEIFAKAISEVDERFFIRLKESALFREDTSGRDTYLFFQDENYTDKEYHKDYPTIHHLIKELMEDTTPRDVRLVYLAVAWLMSHRGHFLSEVNKDNISALLDFDLIYEKFMELFLVPPWVCHDREQFQSVLLSHQTVKNKERKFWDLLYNGKKPKVEEEDCVSKEGIIKLLSGGSVEAGKLFNQKEFQEKISISLKKSEEDFQLLLDEMDEEDSEYLIRLRALYDWALLVDSLHGCSSISEAKVQDYAQHEADLKMLKNFVRKYCPNEYAAIFKNAEKENYASYVYNIPKGKRTKEYKKKITQEEFCDYLKKKLKDIQIEEEDQEIYQDMMFRLETYTFMPKQVTGDNRVIPYQLYYDELKKILENAENYLPFLKKVDEQGISNKTKLLSIFEFRIPYYVGPLCSASKYAWLKRKAEGKIYPWNFEEKVDLDQSEKAFINRMTNNCSYLPGETVLPQNSLLYCKFTVLNEINNIKINGIPISVECKQEIYRLFEENKKVTVDKIKKYLISNNYMEKEDVLGGIDITIKSSLKPQHDFKRLLHSKILNEKEVEQIIECITYSEEKSRVLRRLEREFPKLSDEDRRYLSKLKYSGFGRLSREFFTGIHGANKETGESFSIIQALWDTNDNLMQLLSDRYTFKDSIEEEQRQYYEEHPMTVESLLEEMYVSNAVKRPIYRTLDVIKDIQSVCKAAPKKIYVEMARGQEEGSSRKKSRKDQILEMYKDMDKGEVRELSKQLEDCSERELRSEVLFLYFMQLGRSMYSGKPIDIEKLKTDAYNVDHIYPQCRVKDDSLSNKVLVLSEENGAKGDRYPISAEIRQKMGEMWRVYHEKGLISDEKYRRLTRVSAFSNTEKMEFINRQLVETRQSTKALTRIFQYIFPETEIVFVKAGLVSDFRNEVLECAKSRIVNDLHHAKDAYLNIVAGEVYHARFTAKFFKIDQDEYSVKTKVIFGNKVWCGKDLVWDGGKDIARVKKTLTKNNVHYTRYAFERKGGLFDQQPLRAASGLIERKAGLDTEKYGGYNKSTASYFLLVKYIEEGKKPKQDVMFVPIDLMESERIMDNETYAKDYVRNTIVQIIGKPRDVVQEVSFLLGMRKIKVNTLLTFDGFEATLASKSNGGKTLVFGSMMPLFVDNKKESYIKRLESFAKKKKQNNSLLVDEVYDKITKEENRELFLFLTNKVKEMPYCLIFGSQLQVLHDKENEFENLKLEQQVETLLNVLFIFKTGRTTGCDLKALGGAGQAGIFTESSKLSNWKKSYKDVRIVDISAAGLHRKISQNLLELL

SEQ ID NO: 226 - protein, 1352 aa, synthetic construct
  REGION 1..1352: note = MG46-11 effector
MKENYYLGLDIGTNSVGYAVTDGRFNLLKYKGEPMWGSHVFEEGKQCSDRRMHRTARRRLDRRQQRVHLTQEIFAKAISEVDERFFVRLKESALFREDTSGRDTYIFFQDENYTDKEYHRDYPTIHHLIKELMEDTTPHDVRLVYLAVAWLMAHRGHFLSEVNKDNITELLDFDSIYGNLMELFTTPPWICSDKEEFKNILLLHQTIKNKERKFWGLLYEGKKPKTDEEDYINKEGMIRLLSGGTVEAGKLFNQKKFQEKISISLKKSEEDFQLLLDEMDEEDSEYLIRLRALYDWALLVDSLHGCSSISEAKVQDYIQHEADLKMLKSFVRKYCPNEYATIFKNAEKENYASYVYNIPKGKRTKEYKKKITQEEFCDYLKKKLKDMQIDEEDEEIYQDMMFRLETYTFMPKQVTGDNRVIPYQLYYDELKKILKNAENYLPFLKKEDEQGISNKTKLLSIFEFRIPYYVGPLCSTSKYAWLKRKSEGKIYPWNFEEKVDLDQSEEAFINRMTNNCSYLPGKTVLPQNSLLYCKFTVLNEINNLKINGIPISVECKQEIYKLFEENKKVTVDKIKKYLISNNYMTKEDVLGGIDVTIKSSLKPHHDFKRLLHLGILNEREVEKIIQCITYSEEKSRVLRRLEREFPKISDEDRRYLSKLKYSGFGRLSREFFTEICGVNKETGESFNIIQALWNTNDNLMQLLSDRYTFKESIEEEQHKYYEEHPMTVESLLEEMYVSNAVKRPIYRTLDIIKDIQSVCKTAPKKIYIEMARGQAEGSNRKRSRKDQILELYKNMDKGEVRELSKQLEDCSDRELRSEVLFLYFMQLGRSMYSGKPIDIEKLKTNAYDVDHIYPQCRVKDDSLSNKVLVLSEENGAKGDRYPISAEIRQKMGEMWRVYHEKGLISDEKYRRLTRVSAFSNTEKMEFINRQLVETRQSTKALTRIFQYIFPETEIVFVKAGLVSDFRNEVLECAKSRIVNDLHHAKDAYLNIVAGEVYHARFTAKFFKIDQDEYSVKTKVIFGNKVWCGKDLVWDGGKDIVRVKKTLTKNSVHYTRYGFERKGGLFDQQPLRAASGLIERKAGLDTEKYGGYNKSTASYFLLVKYIEEGKKPKQDVMFVPIDLMESERIMDNETYAKDYVRNTIVQIIGKPRDVVQEVSFPLGMRKIKVNTLLTFDGFEATLASKSSKGQKIVFGSMMPLFVDGKKEQYIKRLESFSKKKKQNNSLLVDEVYDKITKEENRELFLFLTNKVEEEPYCLIFGSQLQVLHDKENEFENLNLEQQVETLLNLLSIFKTGRTTGCDLKLLGGAGQAGIFTESSKLSNWKKSYKDVRIVDISAAGLHRKTSQNLLELL

SEQ ID NO: 227 - protein, 1352 aa, synthetic construct
  REGION 1..1352: note = MG46-12 effector
MKENYYLGLDIGTNSVGYAVTDGWFNLLKYKGEPMWGSHVFEEGKQCSDRRMHRTARRRLDRRQQRVHLTQEIFAKAISEVDERFFVRLKESALFREDTSGRDTYIFFQDENYTDKEYHRDYPTIHHLIKELMEDTTPHDVRLVYLAVAWLMAHRGHFLSEVNKDNITELLDFDSIYGNLMELFTTPPWICSDKEEFKNILLLHQTIKNKERKFWGLLYEGKKPKTDEEDYINKEGMIRLLSGGTVEAGKLFNQKEFQEKISISLKKSEEDFQLLLDEMDEEDSEYLIRLRALYDWALLVDSLHGCSSISEAKVQDYIQHEADLKMLKSFVRKYCPNEYATIFKNAEKENYASYVYNIPKGKRTKEYKKKITQEEFCDYLKKKLKDMQIDEEDEEIYQDMMFRLETYTFMPKQVTGDNRVIPYQLYYDELKKILKNAENYLPFLKKEDEQGISNKTKLLSIFEFRIPYYVGPLCSTSKYAWLKRKSEGKIYPWNFEEKVDLDQSEEAFINRMTNNCSYLPGKTVLSQNSLLYCKFTVLNEINNLKINGIPISVECKQEIYKLFEENKKVTVDKIKKYLISNNYMTKEDVLGGIDVTIKSSLKPHHDFKRLLHLGILNEREVEKIIQCITYSEEKSRVLRRLEREFPKISDEDRRYLSKLKYSGFGRLSREFFTEICGVNKETGESFNIIQALWNTNDNLMQLLSDRYTFKESIEEEQHKYYEEHPMTVESLLEEMYVSNAVKRPIYRTLDVIKDIQSVCKAAPKKIYIEMARGQEEGSNRKRSRKDQILELYKNMDKGEVRELSKQLEDCSDRELRSEVLFLYFMQLGRSMYSGKPIDIEKLKTNAYDVDHIYPQCRVKDDSLSNKVLVLSEENRAKGDKYPISAVIRQNMGEMWRVYHEKGLISDEKYRRLTRVSAFSNAEKMEFINRQLVETRQSTKALTRIFRYIFPETEIVFVKAGLVSDFRNEVLKCAKSRIVNDLHHAKDAYLNIVAGEVYHARFTSKFFKIDQDEYSVKTKAIFGNKVWNGKELVWDGEKDIARVKKILTKNSVHYTRYAFERKGGLFDQQPLRAASGLIERKAGLDTEKYGGYNKSTASYFLLVKYAEAGKKPKQDVMFVPIDLMESEQIIKSESYAKYYVRNAIAHIIGKSREIVQEVSFPLGMRKMKVNTLLTLDGFEAILASKSNGGKTLVFGSMMPLFVNNKKEIYIKRLESFSKKKKQNNFLFVDEVYDKITKEENRELFLFLTNKVEEEPYCLIFGSQLQVLHDKENEFENLNLEQQVETLLNLLSIFKTGRTTGCDLKLLGGAGQAGIFTESSKLSNWKKSYKDVRIVDISAAGLHRKTSQNLLELL

SEQ ID NO: 228 - protein, 1352 aa, synthetic construct
  REGION 1..1352: note = MG46-13 effector
MKENYYLGLDIGTNSVGYAVTDGGFNLLKYKGEPMWGSHVFEEGKQCSDRRMHRTARRRLDRRQQRVHLTQEIFAKAISEVDERFFIRLKESALFREDTSGRDTYLFFQDENYTDKEYHKDYPTIHHLIKELMEDTTPRDVRLVYLAVAWLMSHRGHFLSEVNKDNISALLDFDLIYEKFMELFLVPPWVCHDREQFQSVLLSHQTVKNKERKFWDLLYNGKKPKVEEEDCVSKEGIIKLLSGGSVEAGKLFNQKEFQEKISISLKKSEEDFQLLLDEMDEEDSEYLIRLRALYDWALLVDSLHGCSSISEAKVQDYAQHEADLKMLKNFVRKYCPNEYAAIFKNAEKENYASYVYNIPKGKRTKEYKKKITQEEFCDYLKKKLKDIQIEEEDQEIYQDMMFRLETYTFMPKQVTGDNRVIPYQLYYDELKKILKNAENYLPFLKKVDEQGISNKTKLLSIFEFRIPYYVGPLCSASKYAWLKRKAEGKIYPWNFEEKVDLDQSEKAFINRMTNNCSYLPGETVLPQNSLLYCKFTVLNEINNIKINGIPISVECKQEIYRLFEENKKVTVDKIKKYLISNNYMEKEDVLGGIDITIKSSLKPQHDFKRLLHSKILNEKEVEQIIECITYSEEKSRVLRRLEREFPKLSDEDRRYLSKLKYSGFGRLSREFFTGIHGANKETGESFSIIQALWDTNDNLMQLLSDRYTFKDSIEEEQRQYYEEHPMTVESLLEEMYVSNAVKRPIYRTLDVIKDIQSVCKAAPKKIYIEMARGQEEGSNRKRSRKDQILELYKNMDKGEVRELSKQLEDCSDRELRSEVLFLYFMQLGRSMYSGKPIDIEKLKTNAYDVDHIYPQCRVKDDSLSNKVLVLSEENRAKGDKYPISAVIRQNMGEMWRVYHEKGLISDEKYRRLTRVSAFSNAEKMEFINRQLVETRQSTKALTRIFRYIFPETEIVFVKAGLVSDFRNEVLKCAKSRIVNDLHHAKDAYLNIVAGEVYHARFTSKFFKIDQDEYSVKTKAIFGNKVWNGKELVWDGEKDIARVKKILTKNSVHYTRYAFERKGGLFDQQPLRAASGLIERKAGLDTEKYGGYNKSTASYFLLVKYAEAGKKPKQDVMFVPIDLMESEQIIKSESYAKYYVRNAIAHIIGKSREIVQEVSFPLGMRKMKVNTLLTLDGFEAILASKSNGGKTLVFGSMMPLFVNNKKEIYIKRLESFSKKKKQNNFLFVDEVYDKITKEENRELFLFLTNKVEEEPYCLIFGSQLQVLHDKENEFENLNLEQQVETLLNLLSIFKTGRTTGCDLKLLGGAGQAGIFTESSKLSNWKKSYKDVRIVDISAAGLHRKTSQNLLELL

SEQ ID NO: 229 - protein, 1352 aa, synthetic construct
  REGION 1..1352: note = MG46-14 effector
MKENYYLGLDIGTNSVGYAVTDGRFNLLKYKGEPMWGSHVFEEGKQCSDRRMHRTARRRLDRRQQRVHLTQEIFAKAISEVDERFFIRLKESALFREDTSGRDTYLFFQDENYTDKEYHKDYPTIHHLIKELMEDTTPHDVRLVYLAVAWLMAHRGHFLSEVNKDNITELLDFDSIYGNLMELFTTPPWICSDKEEFKNILLLHQTIKNKERKFWGLLYEGKKPKTDEEDYINKEGMIRLLSGGTVEAGKLFNQKEFQEKISISLKKSEEDFQLLLDEMDEEDSEYLIRLRALYDWALLVDSLHGCSSISEAKVQDYIQHEADLKMLKSFVRKYCPNEYATIFKNAEKENYASYVYNIPKGKRTKEYKKKITQEEFCDYLKKKLKDMQIDEEDEEIYQDMMFRLETYTFMPKQVTGDNRVIPYQLYYDELKKILKNAENYLPFLKKEDEQGISNKTKLLSIFEFRIPYYVGPLCSTSKYAWLKRKSEGKIYPWNFEEKVDLDQSEEAFINRMTNNCSYLPGKTVLPQNSLLYCKFTVLNEINNLKINGIPISVECKQEIYKLFEENKKVTVDKIKKYLISNNYMTKEDVLGGIDVTIKSSLKPHHDFKRLLHLGILNEREVEKIIQCITYSEEKSRVLRRLEREFPKISDEDRRYLSKLKYSGFGRLSREFFTEICGVNKETGESFNIIQALWNTNDNLMQLLSNRYTFKESIEEEQHKYYEEHPMTVESLLEEMYVSNAVKRPIYRTLDIIKDIQSVCKTAPKKIYIEMARGQEEGSNRKRSRKDQILELYKNMDKGEVRELSKQLEDCSDRELRSEVLFLYFMQLGRSMYSGKPIDIEKLKTNAYDVDHIYPQCRVKDDSLSNKVLVLSEENRAKGDKYPISAVIRQNMGEMWRVYHEKGLISDEKYRRLTRVSAFSNAEKMEFINRQLVETRQSTKALTRIFRYIFPETEIVFVKAGLVLDFRNEVLKCAKSRIVNDLHHAKDAYLNIVAGEVYHARFTSKFFKIDQDEYSVKTKAIFGNKVWNGKELVWDGEKDIARVKKILTKNSVHYTRYAFERKGGLFDQQPLRAASGLIERKAGLDTEKYGGYNKSTASYFLLVKYAEAGKKPKQDVMFVPIDLMESEQIIKSESYAKYYVRNAIAHIIGKSREIVQEVSFPLGMRKMKVNTLLTLDGFEAILASKSNGGKTLVFGSMMPLFVNNKKEIYIKRLESFSKKKKQNNFLFVDEVYDKITKEENRELFLFLTNKVEEEPYCLIFGSQLQVLHDKENEFENLNLEQQVETLLNLLSIFKTGRTTGCDLKLLGGAGQAGIFTESSKLSNWKKSYKDVRIVDISAAGLHRKTSQNLLELL

SEQ ID NO: 230 - protein, 1352 aa, synthetic construct
  REGION 1..1352: note = MG46-15 effector
MKENYYLGLDIGTNSVGYAVTDGGFNLLKYKGEPMWGSHVFEEGKQCSDRRMHRTARRRLDRRQQRVHLTQEIFAKAISEVDERFFVRLKESALFREDTSGRDTYIFFQDENYTDKEYHRDYPTIHHLIKELMEDTTPHDVRLVYLAVAWLMAHRGHFLSEVNKDNITELLDFDSIYGNLMELFTTPPWICSDKEEFKNILLLHQTIKNKERKFWGLLYEGKKPKTDEEDYINKEGMIRLLSGGTVEAGKLFNQKEFQEKISISLKKSEEDFQLLLDEMDEEDSEYLIRLRALYDWALLVDSLHGCSSISEAKVQDYIQHEADLKMLKSFVRKYCPNEYATIFKNAEKENYASYVYNIPKGKRTKEYKKKITQEEFCDYLKKKLKDVQIDEEDEEIYQDMMFRLETYTFMPKQVTGDNRVIPYQLYYDELKKILKNAENYLPFLKKEDEQGISNKTKLLSIFEFRIPYYVGPLCSTSKYAWLKRKSEGKIYPWNFEEKVDLDQSEEAFINRMTNNCSYLPGKTVLPQNSLLYCKFTVLNEINNLKINGIPISVECKQEIYKLFQENKKVTVDKIKKYLISNNYMTKEDVLGGIDVTIKSSLKPHHDFKRLLHLGILNEREVEKIIQCITYSEEKSRVLRRLEREFPKISDEDRRYLSKLKYSGFGRLSREFFTEICGVNKETGESFNIIQALWNTNDNLMQLLSDRYTFKESIEEEQHKYYEEHPMTVESLLEEMYVSNAVKRPIYRTLDIIKDIQSVCKTAPKKIYIEMARGQEEGSNRKRSRKDQILELYKNMDKGEVRELSKQLEDCSDRELRSEVLFLYFMQLGRSMYSGKPIDIEKLKTDVYNVDHIYPQCRVKDDSLSNKVLVLSEENGAKGDRYPISAEIRQKMGEMWRVYHEKGLISDEKYRRLTRVSAFSNTEKMEFINRQLVETRQSTKALTRIFQYIFPETEIVFVKAGLVSDFRNEVLECAKSRIVNDLHHAKDAYLNIVAGEVYHARFTAKFFKIDQDEYSVKTKVIFGNKVWCGKDLVWDGGKDIARVKKTLTKNSVHYTRYAFERKGGLFDQQPLRAASGLIERKAGLDTEKYGGYNKSTASYFLLVKYIEAGKKPKQDVMFVPIDLMESERIMDNKAYAKEYVRNTIAQIIGKPRDVVQEVSFPLGMRKIKVNTLLTFDGFEATLASKSSKGQKIVFGSMMPLFVAGKKEQYIKRLESFYKKKKQNNSLLVDEVYDKITKEENRELFLFLTNKVKEMPYCLIFGSQLQVLHDKENEFKNLKLEQQVETLLNVLSIFKTGRTTGCDLKALGGARQAGIFTESSKLSNWKKSYKDVRIVDISAAGLHRKISQNLLELL

SEQ ID NO: 231 - protein, 1352 aa, synthetic construct
  REGION 1..1352: note = MG46-16 effector
MKKNYYLGLDIGTNSVGYAVTDGKFNLLKYKGEPMWGAHVFEEGKQCSDRRMHRTARRRLDRRQQRVHLTQEIFAKAISEVDERFFIRLKESALFREDTSGRDTYLFFQDENYTDKEYHKDYPTIHHLIKELMEDTTPRDVRLVYLAVAWLMSHRGHFLSEVNKDNISALLDFDLIYEKFMELFLVPPWVCHDREQFQSVLLSHQTVKNKERKFWDLLYNGKKPKVEEEDCVSKEGIIKLLSGGSVEAGKLFNQKEFQEKISISLKKSEEDFQLLLDEMDEEDSEYLIRLRALYDWALLVDSLHGCSSISEAKVQDYAQHEADLKMLKNFVRKYCPNEYAAIFKNAEKENYASYVYNIPKGKRTKEYKKKITQEEFCDYLKKKLKDIQIEEEDQEIYQDMMFRLETYTFMPKQVTGDNRVIPYQLYYDELKKILENAENYLPFLKKVDEQGISNKTKLLSIFEFRIPYYVGPLCSASKYAWLKRKAEGKIYPWNFEEKVDLDQSEKEFINRMTNNCSYLPGETVLPQNSLLYCKFTVLNEINNIKINGIPISVECKQEIYRLFEENKKVTVDKIKKYLISNNYMEKEDVLGGIDITIKSSLKPQHDFKRLLHSKILNEKEVEQIIECITYSEEKSRVLRRLEREFPKLSDEDRRYLSKLKYSGFGRLSREFFTGIHGANKETGESFSIIQALWDTNDNLMQLLSDRYTFKESIEEEQHKYYEEHPMTVESLLEEMYVSNAVKRPIYRTLDIIKDIQSVCKTAPKKIYIEMARGQEEGSNRKRSRKDQILELYKNMDKGEVRELSKQLEDCSDRELRSEVLFLYFMQLGRSMYSGKPIDIEKLKTNAYDVDHIYPQCRVKDDSLSNKVLVLSEENRAKGDKYPISAVIRQNMGEMWRVYHEKGLISDEKYRRLTRVSAFSNAEKMEFINRQLVETRQSTKALTRIFRYIFPETEIVFVKAGLVSDFRNEVLKCAKSRIVNDLHHAKDAYLNIVAGEVYHARFTSKFFKIDQDEYSVKTKAIFGNKVWNGKELVWDGEKDIARVKKILTKNSVHYTRYAFERKGGLFDQQPLRAASGLIERKAGLDTEKYGGYNKSTASYFLLVKYAEAGKKPKQDVMFVPIDLMESEQIIKSESYAKDYVRNAIAHIIGKSREIVQEVSFPLGMRKMKVNTLLTFDGFEAILASKSNGGKTLVFGSMMPLFVNNKKEIYIKRLESFSKKKKQNNFLFVDEVYDKITKEKNRELFLFLTNKVEEEPYCLIFGSQLQVLHDKENEFENLNLEQQVETLLNLLSIFRTGRTTGCDLKLLGGAGQAGIFTESSKLSNWKKSYKDVRIVDISAAGLHRKISQNLLELL

SEQ ID NO: 232 - protein, 192 aa, synthetic construct
  REGION 1..192: note = MG46-17 effector
MGLRPLKVNTRFSFDGFEACVTGKANGGKILGISSLVALKMDHKKDNYIKKVEKYIEKRKLNINIKLDEKYDGINYESNQMIYNILVEKIQCSIYKTMFGSLVEGLENAKSIFEQLSLEEQCLCINSLINVFKTGRSSGCDLTLIGGKKQAAVCTVSSKVSNWGKNYKCVKIIDESASGIFRKESENILEWL

SEQ ID NO: 233 - protein, 352 aa, synthetic construct
  REGION 1..352: note = MG46-18 effector
MKENYYLGLDIGTNSVGYAVTDGRFNLLKYKGEPMWGSHVFEEGKQCSDRRMHRTARRRLDRRQQRVHLTQEIFAKAISEVDERFFVRLKESALFREDTSGRDTYIFFQDENYTDKEYHRDYPTIHHLIKELMEDTTPHDVRLVYLAVAWLMAHRGHFLSEVNKDNITELLDFDSIYGNLMELFTTPPWICSDKEEFKNILLLHQTIKNKERKFWGLLYEGKKPKTDEEDYINKEGMIRLLSGGTVEAGKLFNQKEFQEKISISLKKSEEDFQLLLDEMDEEDSEYLIRLRALYDWALLVDSLHGCSSISEAKVQDYIQHEADLKMLKSFVRKYCPNEYATIFKNAAINEQI

SEQ ID NO: 234 - protein, 356 aa, synthetic construct
  REGION 1..356: note = MG46-19 effector
MYEQHKKDLAGLKAFIRKYCPDKYNEIFRDAGDNNYVAYSYNFNSLNLDEGEKRPKRKALQEDFCTYIRKIVKDIKCEMEDKEFYEDMGKRLELGTFMPKQVNTDNRVLPYQLYYFELARLLEKVSSYLPFINEKDSEGYITKEKLLSIMEFRIPYYVGPLHRDHKENNSFAWIKRKAQGRIYPWNYEEKIDLDASEQAFIDKMTNQCSYLPGEDVLPKYSLLYCKYEVLNEINNIKINGQRITVDCKKEIFGLFKRNKKVTVKRIRDFLVSNNYMSDSDEITGLDISVKSSLKSYHDFRRMLENKTVNEEDVEEIIKRLTYTEDKKRINKYLEENYPNISEEDRRYISKLKYKDF

SEQ ID NO: 235 - protein, 744 aa, synthetic construct
  REGION 1..744: note = MG46-20 effector
MKKRTIEEYYLGLDIGTNSVGYAVTDPQYKILKYHGEPMWGSHVFEEGSQCAERRGFRTARRRLNRRQQRVRFVQEIFAHEIEKVDSRFFLRIKESALYREDANGNDPFILFNDNGYTDKEYYLKYPTIHHLIMDLIDDENPHDVRLVYLAVAWLVAHRGHFLSDVEKTNVEKVLDFSTSYNAFKEMYHSIGQDIPWVDEEETFKNILLKKCGVKDKEKAFKDELFKNNSNKKTSEGTEENDILGTNSVITLLSGGTVTADKLFVQAEFQDKISISFKKNEDEFEQILTELDEYAEYLLKIRAVYDWAVLYEASQGQVYISKAKIEVYEQHKKDLAGLKVFIRKYCPDKYNEIFRDAGDNNYVAYSYNFNSLNLDEGEKRPKRKALQEDFCTYIRKIVKDIKCEMEDKEFYEDMGKRLELGTFMPKQVNTDNRVLPYQLYYFELARLLEKVSSYLPFINEKDSEGYITKEKLLSIMEFRIPYYVGPLHRDHKENNSFAWIKRKAQGRIYPWNYEEKIDLDASEQAFIDKMTNQCSYLPGEDVLPKYSLLYCKYEVLNEINNIKINGQRITVDCKKEIFGLFKRNKKVTVKRIRDFLVSNNYMSDSDEITGLDISVKSSLKSYHDFRRMLENKTVNEEDVEEIIKRLTYTEDKKRINKYLEENYPNISGEDRRYISKLKYKDFGRLSEKFLTGIKGVVKETGEILSVIQIMWETNDNLMQIIFSDHYTIKDTIICNTLFESSVNP

SEQ ID NO: 236 - protein, 1377 aa, synthetic construct
  REGION 1..1377: note = MG46-21 effector
MKKRTIEEYYLGLDIGTNSVGYAVTDPQYKILKYHGEPMWGSHVFEEGSQCAERRGFRTARRRLNRRQQRVRFVQEIFAHEIEKVDSRFFLRIKESALYREDANGNDPFILFNDNGYTDKEYYLKYPTIHHLIMDLIDDENPHDVRLVYLAVAWLVAHRGHFLSDVEKTNVEKVLDFSTSYNAFKEMYHSIGQDIPWVDEEETFKNILLKKCGVKDKEKAFKDELFKNNSNKKTSEGTEENDILGTNSVITLLSGGTVTADKLFVQAEFQDKISISFKKNEDEFEQILTELDEYAEYLLKIRTVYDWAVLYEASQGQVYISKAKIEVYEQHKKDLAGLKAFIRKYCPDKYNEIFRDAGDNNYVAYSYNFNSLNLDEGEKRPKRKALQEDFCTYIRKIVKDIKCEMEDKEFYEDMGKRLELGTFMPKQVNTDNRVLPYQLYYFELARLLEKVSSYLPFINEKDSEGYITKEKLLSIMEFRIPYYVGPLHRDHKENNSFAWIKRKAQGRIYPWNYEEKIDLDASEQAFIDKMTNQCSYLPGEDVLPKYSLLYCKYEVLNEINNIKINGQRITVDCKKEIFGLFKRNKKVTVKRIRDFLVSNNYMSDSDEITGLDISVKSSLKSYHDFRRMLENKTVNEEDVEEIIKRLTYTEDKKRINKYLEENYPNISEEDRRYISKLKYKDFGRLSEKFLTGIKGVVKETGEILSVIQIMWETNDNLMQIIFSDHYTIRDVLEREREDYYSEHPASVEQILSDMYISNAVKRPIYRTLDIIGDVTKACQNAPRKIFVEMARGGGEKGKRTVSRRDKIKELYKHMDKQEVREISKEISELLGELDKKTDNELQSEVLFLYFMQLGICMYSGDPIDITKLKSDAYVNVDHIYPQAYVKDDSLNNKVLVKSKLNGEKSDNYPINKDIRDKMSSIWKHYRKEGLISEEKYNRLTRKTPFTDEEKQGFVNRQLVETRQSTKAVAEILKTMFPKTEVVYVKAGLASEFRHAFGIIKSRQINDLHHAKDAYLNVVCGNVYHSTFTKKFFQNNPKYSIKTETVYKRKIEVDGKPIWNGQESLSFVIKMLGKNNIHYTRYAFCRKGGFFDQMPVTAKEGLVSRKKNLPSEKYGGYNKPTASYFIMAKYTEKVKKEKQDIMIVPVELMVGEKVLNDKNFAVGYIQQQIAQISNRKVEEIVNVSFPLGLRPLKVNTRFSFDGFEACVTGKANGGKILGISSLVALKMDNKKDNYIKKVEKYIEKRKLNINIKLDEKYDGINYESNQMIYNILVEKIQCSIYKTMFGSLVEGLENAKSIFEQLSLEEQCLCINSLINVFKTGRSSGCDLTLIGGKKQAAVCTVSSKVSNWGKNYKCVKIIDESASGIFRKESENILEWL

SEQ ID NO: 237 - protein, 1352 aa, synthetic construct
  REGION 1..1352: note = MG46-22 effector
MKENYYLGLDIGTNSVGYAVTDGGFNLLKYKGEPMWGSHVFEEGKQCSDRRMHRTARRRLDRRQQRVHLTQEIFAKAISEVDERFFVRLKESALFREDTSGRDTYIFFQDKNYTDKEYHRDYPTIHHLIKELMEDTTPHDVRLVYLAVAWLMAHRGHFLSEVNKDNITELLDFDSIYGNLMELFTTPPWICSDKEEFKNILLLHQTIKNKERKFWGLLYEGKKPKTDEEDYINKEGMIRLLSGGTVEAGKLFNQKEFQEKISISLKKSEEDFQLLLDEMDEEDSEYLIRLRALYDWALLVDSLHGCSSISEAKVQDYIQHEADLKMLKSFVRKYCPNEYATIFKNAEKENYASYVYNIPKGKRTKEYKKKITQEEFCDYLKKKLKDVQIDEEDEEIYQDMMFRLETYTFMPKQVTGDNRVIPYQLYYDELKKILKNAENYLPFLKKEDEQGISNKTKLLSIFEFRIPYYVGPLCSTSKYAWLKRKSEGKIYPWNFEEKVDLDQSEEAFINRMTNNCSYLPGKTVLPQNSLLYCKFTVLNEINNLKINGIPISVECKQEIYRLFEENKKVTVDKIKKYLISNNYMKKEDVLGGIDITIKSSLKPQHDFKRLLHSKILNEKEVEQIIECITYSEEKSRVLRRLEREFPKLSDEDRRYLSKLKYSGFGRLSREFFTGIHGANKETGESFSIIQALWDTNDNLMQLLSDRYTFKDSIEEEQRQYYEEHPMTVESLLEEMYVSNAVKRPIYRTLDVIKDIQSVCKAVPKKIYVEMARGQEEGSSRKKSRKDQILELYKDMDKGEVRELSKQLEDCSERELRSEVLFLYFMQLGRSMYSGKPIDIEKLKTDVYNVDHIYPQCRVKDDSLSNKVLVLSEENGAKGDRYPISAEIRQKMGEMWRVYHEKGLISDEKYRRLTRVSAFSNAEKMEFINRQLVETRQSTKALTRIFRYIFPETEIVFVKAGLVSDFRNEVLKCAKSRIVNDLHHAKDAYLNIVAGEVYHVRFTSKFFKIDQDEYSVKTKAIFGNKVWNGKELVWDGEKDIARVKKILTKNSVHYTRYAFERKGGLFDQQPLRAASGLIERKAGLDTEKYGGYNKSTASYFLLVKYAEAGKKPKQDVMFVPIDLMESEQIIKSESYAKDYVRNAIAHIIGKSREIVQEVSFPLGMRKMKVNTLLTFDGFEAILASKSNGGKTLVFGSMMPLFVNNKKEIYIKRLESFSKKKKQNNFLFVDEVYDKITKEENRELFLFLTNKVEEEPYCLIFGSQLQVLHDKENEFENLNLEQQVETLLNLLSIFKTGRTTGCDLKLLGGAGQAGIFTESSKLSNWKKSYKDVRIVDISAAGLHRKISQNLLELL

SEQ ID NO: 238 - protein, 1377 aa, synthetic construct
  REGION 1..1377: note = MG46-23 effector
MKKRAIEEYYLGLDIGTNSVGYAVTDPQYKILKYHGEPMWGSHVFEEGSQCAERRGFRTARRRLNRRQQRVRLVQEIFAHEIEKVDSRFFLRLKESALYREDANGNDPFILFNDNGYTDKEYYLKYPTIHHLIMDLIDDENPHDVRLVYLAVAWLVAHRGHFLSDVEKTNVEKVLDFSTSYNALKEMYSGIGQDLPWIDEEETFKNILLRKCGVKDKEKAFKDKLLKNNSNKKNSDITEESEVLGISAVITLLSGGTVAADKLFVQAEFQDKISISFKKNEDEFEQILTELDEYAEYLLKIRAVYDWAVLYEASKGQVYISKAKIEVYEQHKKDLAGLKAFIRKYCPDKYNEIFRDAGDNNYVAYSYNFNSLNLTDGEKRPKRKASQEDFCTYIRKIVKDIKCEMEDKEFYDDMWQRLELGTFMPKQVNTDNRVLPYQLYYFELARLLGRVSAYLPFINEKDNDGYITKEKLLSIMEFRIPYYVGPLHRENKDNNSFAWIQRKAQGRIYPWNYEEKIDLDASEQAFINKMTNQCSYLPGEDVLPKYSLLYCKYEVLNEINNIKINGQKITVECKKGIFGLFKKNKKVTVKKIKDFLISNNYMGTSDEITGLDISVKSSLKSYHDFRKMLENKIVNEEDVEEIIKRLTYTEDKKRINRYLEENYPNISEEDRRYISKLKYKDFGRLSEKFLTGIKGVVKETGEILSVIQIMLETNDNLMQIIFSDHYMIKDALEREKKDYYSEHPASVEQILSDMYISNAVKRPIYRTLDIISDVTKACQNAPRKIFVEMARGGGEKGKRTISRRDKIKELYKNMDKQEVREISKEISELLGELDKKTDNELQSEVLFLYFMQLGICMYSGDPIDITKLKSDAYVNVDHIYPQAYVKDDSLNNKVLVKSKLNGEKSDNYPINKDIRDKMSSIWKHYRKEGLISEEKYNRLTRKTPFTDEEKQGFVNRQLVETRQSTKAVAEILKMMFPETEVVYVKAGLASEFRHVFGIIKSRQINDLHHAKDAYLNVVCGNVYHSTFTKNFFLKHQTYSIKTETVYKRRIEADGKLIWNGQESLSFVKKMLGKNNIHYTRYAFCRKGGFFDQMPVTAKEGLVSRKKDLPSEKYGGYNKPTASYFIMAKYTEKVKKEKQDIMIVPVELMVGEKVLNDKKFAIGYIQQQIAQISNRKIEEIVNVSFPMGLRPLKVNTRFSFDGFEACVTGKDSGGKNISMSSLTSLKVSQANEKYIKKVERFAEKKEVNNKITLDEKYDEINENLNFEIYRMLQQKITKSCFGVAFGNLSNVFEKGENKFVALKTDMQCEVLLNIINVFKTGRSGTCNLKSIGGVEKAASYRISAKVSNWKKNYTCVKIIDESASGIFRKESENILEWL

SEQ ID NO: 239 - protein, 1352 aa, synthetic construct
  REGION 1..1352: note = MG46-24 effector
MKENYYLGLDIGTNSVGYAVTDGGFNLLKYKGEPMWGSHVFEEGNQCSDRRMHRTARRRLDRRQQRVHLTQEIFAKAISEVDERFFVRLKESALFREDTSGRDTYIFFQDENYTDKEYHRDYPTIHHLIKELMEDTTPHDVRLVYLAVAWLMAHRGHFLSEVNKDNITELLDFDSIYGNLMELFTTPPWICSDKEEFKNILLLHQTIKNKERKFWGLLYEGKKPKTDEEDYINKEGMIRLLSGGTVEAGKLFNQKEFQEKISISLKKSEEDFQLLLDEMDEEDSEYLIRLRALYDWALLVDSLHGCSSISEAKVQDYIQHEADLKMLKSFVRKYCPNEYAAIFKNAEKENYASYVYNIPKGKRTKEYKKKITQEEFCDYLKKKLKDIQIEEEDQEIYQDMMFRLETYTFMPKQVTGDNRVIPYQLYYDELKKILKNAENYLPFLKKVDEQGISNKTKLLSIFEFRIPYYVGPLCSASKYAWLKRKAEGKIYPWNFEEKVDLDQSEKAFINRMTNNCSYLPGETVLPQNSLLYCKFTVLNEINNIKINGIPISVECKQEIYRLFEENKKVTVDKIKKYLISNNYMEKEDVLGGIDITIKSSLKPQHDFKRLLHSKILNEKEVEQIIECITYSEEKSRVLRRLEREFPKLSDEDRRYLSKLKYSGFGRLSREFFTGIHGANKETGESFSIIQALWDTNDNLMQLLSDRYTFKDSIEEEQRQYYEEHPMTVESLLEEMYVSNAVKRPIYRTLDVIKDIQSVCKAAPKKIYIEMARGQEEGSNRKRSRKDQILELYKNMDKGEVRELSKQLEDCSDRELRSEVLFLYFMQLGRSMYSGKPIDIEKLKTNAYDVDHIYPQCRVKDDSLSNKVLVLSEENRAKGDKYPISAVIRQNMGEMWRVYHEKGLISDEKYRRLTRVSAFSNAEKMEFINRQLVETRQSTKALTRIFRYIFPETEIVFVKAGLVSDFRNEVLKCAKSRIVNDLHHAKDAYLNIVAGEVYHARFTSKFFKIDQDEYSVKTKAIFGNKVWNGKELVWDGEKDIARVKKILTKNSVHYTRYAFERKGGLFDQQPLRAASGLIERKAGLDTEKYGGYNKSTASYFLLVKYAEAGKKPKQDVMFVPIDLMESEQIIKSESYAKYYVRNAIAHIIGKSREIVQEVSFPLGMRKMKVNTLLTLDGFEAILASKSNGGKTLVFGSMMPLFVNNKKEIYIKRLESFSKKKKQNNFLFVDEVYDKITKEENRELFLFLTNKVEEEPYCLIFGSQLQVLHDKENEFENLNLEQQVETLLNLLSIFKTGRTTGCDLKLLGGAGQAGIFTESSKLSNWKKSYKDVRIVDISAAGLHRKTSQNLLELL

SEQ ID NO: 240 - protein, 1377 aa, synthetic construct
  REGION 1..1377: note = MG46-25 effector
MKKRTIEEYYLGLDIGTNSVGYAVTDPQYKILKYHGEPMWGSHVFEEGSQCAERRGFRTARRRLNRRQQRVRFVQKIFAHEIEKVDSRFYLRIKESALYREDANGNDPFILFNDNGYTDKEYYLKYPTIHHLIMDLIDDENPHDVRLVYLAVAWLVAHRGHFLSDVEKTNVEKVLDFSTSYNAFKEMYHSIGQDIPWVDEEETFKNILLKRCGVKDKEKAFKDELFKNNSNKKASEGTEENDILGTNAVITLLSGGTVTADKLFVQAEFQDKISISFKKNEDEFEQILTELDEYAEYLLKIRAVYDWAVLYEASQGQVYISKAKIEVYEQHKKDLAGLKAFIRKYCPDKYNEIFRDAGDNNYVAYSYNFNSLNLDEGEKRPKRKASQEDFCTYIRKIVKDIKCEIEDKEFYEDMGKRLELGTFMPKQVNTDNRVIPYQLYYFELARLLEKVSSYLPFINEKDSEGYITKEKLLSIMEFRIPYYVGPLHRDHKENNSFAWIKRKAQGRIYPWNYEEKIDLDASEQAFIDKMTNQCSYLPGEDVLPKYSLLYCKYEVLNEINNIKINGQRITVDCKKEIFGLFKRNKKVTVKRIRDFLVSNNYMSDSDEITGLDISVKSSLKSYHDFRRMLENKTVNEEDVEEIIKRLTYTEDKKRINKYLEENYPNISEEDRRYISKLKYKDFGRLSEKFLTGIKGVVQETGEILSVIQIMWETNDNLMQIIFSDHYTIRDVLEREREDYYSEHPASVEQILSDMYISNAVKRPIYRTLDIIGDVTKACQNAPRKIFVEMARGGGEKGKRTVSRRDKIKELYKHMDKQEVREISKEISELLGELDKKTDNELQSEVLFLYFMQLGICMYSGDPIDITKLKSDAYVNVDHIYPQAYVKDDSLNNKVLVKSKLNGEKSDNYPINKDIRDKMSSIWKHYRKEGLISEEKYNRLTRKTPFTDEEKQGFVNRQLVETRQSTKAVAEILKTMFPETEVVYVKAGLASEFRHAFGIIKSRQINDLHHAKDAYLNVVCGNVYHSTFTKKFFQNNLKYSIKTETVYKRKIEVDGKLIWNGQESLSFVIKMLGKNNIHYTRYAFCRKGGFFDQMPVTAKEGLVSRKKNLPSEKYGGYNKPTASYFIMAKYTEKVKKEKQDIMIVPVELMVGEKVLNDKNFAVGYIQQQIAQISNRKIEEIVNVSFPLGLRPLKVNTRFSFDGFEACVTGKSSGGRQLGMSSLESLKVSFVIESYIKKIENYINKKSENTKIILDEKYDGINRTFNIELYDELTNKLLNACYHIIYEKTGDVLLKGKEKFENLSIDAQCQTLMNIIDVLKTGRNGGCNLKDVGGAVNAANFIINSRVSNWKKVYNSVKIIDESASGIFRKESENILEWL

SEQ ID NO: 241 - protein, 1156 aa, synthetic construct
  REGION 1..1156: note = MG46-26 effector
MKKRTIEEYYLGLDIGTNSVGYAVTDPQYKILKYHGEPMWGSHVFEEGSQCAERRGFRTARRRLNRRQQRVRFVQEIFAHEIEKVDSRFFLRIKESALYREDANGNDPFILFNDNGYTDKEYYLKYPTIHHLIMDLIDDENPHDVRLVYLAVAWLVAHRGHFLSDVEKTNVEKVLDFSTSYNAFKEMYHSIGQDIPWVDEEETFKNILLKKCGVKDKEKAFKDELFKNNSNKKTSEGTEENDILGTNSVITLLSGGTVTADKLFVQAEFQDKISISFKKNEDEFEQILTELDEYAEYLLKIRTVYDWAVLYEASQGQVYISKAKIEVYEQHKKDLAGLKAFIRKYCPDKYNEIFRDAGDNNYVAYSYNFNSLNLDEGEKRPKRKALQEDFCTYIRKIVKDIKCEMEDKEFYEDMGKRLELGTFMPKQVNTDNRVLPYQLYYFELARLLEKVSSYLPFINEKDSEGYITKEKLLSIMEFRIPYYVGPLHRDHKENNSFAWIKRKAQGRIYPWNYEEKIDLDASEQAFIDKMTNQCSYLPGEDVLPKYSLLYCKYEVLNEINNIKINGQRITVDCKKEIFGLFKRNKKVTVKRIRDFLVSNNYMSDSDEITGLDISVKSSLKSYHDFRRMLENKTVNEEDVEEIIKRLTYTEDKKRINKYLEENYPNISEEDRRYISKLKYKDFGRLSEKFLTGIKGVVKGGNLSVIQMMWETNDNLMQIIFSDHYMIKDALEREREDYYSEHPASVEQILSDMYISNAVKRPIYRTLDIIGDVTKACQNAPRKIFVEMARGGGEKGKRTVSRRDKIKELYKHMDKQEVREISKEISELLGELDKKTDNELQSEVLFLYFMQLGICMYSGDPIDITKLKSDAYVNVDHIYPQAYVKDDSLNNKVLVKSKLNGEKSDNYPINKDIRDKMSSIWKHYRKEGLISEEKYNRLTRKTPFTDEEKQGFVNRQLVETRQSTKAVAEILKTMFPETEVVYVKAGLASEFRHAFGIIKSRQINDLHHAKDAYLNVVCGNVYHSTFTKKFFQNNLKYSIKTETVYKRKIEVDGKPIWNGQESLSFVIKMLGKNNIHYTRYAFCRKGGFFDQMPVTAKEGLVSRKKNLPSEKYGGYNKPTASYFIMAKYTEKVKKEKQDIMIVPVELMVGEKVLNDKN

SEQ ID NO: 242 - protein, 1365 aa, synthetic construct
  REGION 1..1365: note = MG46-27 effector
MKKRAIEEYYLGLDIGTNSVGYAVTDPQYKILKYHGEPMWGSHVFEEGSQCAERRGFRTARRRLNRRQQRVRFVQEIFAHEIEKVDSRFFLRIKESALYREDANGNDPFILFNDKGYTDKEYYLKYPTIHHLIMDLIDDENPHDVRLVYLAVAWLVAHRGHFLSDVEKTNVEKVLDFSTSYNAFKEMYHGIGQDIPWIDEEEIFRNILLKKCGVKDKEKAFKDELFKNNSNKNNSDKDNEVLGTNAVITLLSGGTVTADKLFAQAEFQDKISISFKKNEDEFEQILTELDEYAEYLLKIRAVYDWAVLYEASKGQVYISKAKIEVYEQHKKDLAGLKAFIRKYCPDKYNEIFRDAGDNNYVAYSYNFNSLNLDEGEKRPKRKASQEDFCTYIRKIVKDIKCEMEDKEFYDDMWQRLELGIFMPKQVNTDNRVIPYQLYYFELARLLEGVSAYLPFINEKDDAGYITKEKLLSIMEYRTPYYVGPLHKENSSFAWIERKAKGRIYPWNYEEKIDLDASEQAFINKMTNQCSYLPGEDVLPKYSLLYCKYEVLNEINNIKVNGQKITVECKKGIFGLFKKNKKVTVKKIRDFLISNNYMSDSDEITGLDISVKSSLKSYHDFRKMLENKIVNEEDVEEIIKRLTYTEDKKRINKYLEENYPNISEEDRRYISKLKYKDFGRLSEKFLTEIKGVVKETGEILSVIQIMWETNDNLMQIIFSDHYTIRDVLERERKDYYSEHPAGVEQILSDMYVSNAVKRPIYRTLDIIGDVTKACQNAPRKIFVEMARGGGEKGKRTVSRRDKIKELYKHMDRQEVREISKLLDEKTDNELQSEVLFLYFMQLGICMYSGDPIDITKLKSDAYVNVDHIYPQAYVKDDSFNNKVLVKSKLNGEKSDIYPINKNIRDKMESIWNHYRNKGLISEEKYNRLTRKTPFTDEEKQGFVNRQLVETRQSTKAVAEILKTMFPETEVVYVKAGLASEFRHAFGIIKSRQINDLHHAKDAYLNVVCGNVYHSTFTKNFFLKHQTYSIKTETVYKRKIEVDEKLIWNGQESLSFVIKMLSKNNIHYTRYAFCRKGGFFDQMPVTAKEGLVSRKKDLPSEKYGGYNKPTASYFIMAKYTEKVKKEKQDIMIVPVELMVSEKVLNDKKFAVGYIQQQIAQISNRKIEEIVNVSFPMGLRPIKVNTRFSFDGFEACVTGKANGGKILGISSLVALKMDNKKDNYIKKIEKYIEKRKLNINIKLDEKYDGINYESNQMIYNILVEKAQCSIYKTMFGSLVEGLENAKSIFEQLSLEEQCLCINSLINVFKTGRSSGCDLTLIGGKKQAAVCTVSSKVSNWGKNYKYVKMIDESASGIFRKESENILEWL

SEQ ID NO: 243 - protein, 1381 aa, synthetic construct
  REGION 1..1381: note = MG46-28 effector
MKKRTIEEYYLGLDIGTNSVGYAVTDPQYKILKYHGEPMWGSHVFEEGSQCAERRGFRTARRRLNRRQQRVRFVQEIFAHEIEKVDSRFFLRIKESALYREDANGNDPFILFNDNGYTDKEYYLKYPTIHHLIMDLIDDENPHDVRLVYLAVAWLVAHRGHFLSDVEKTNVEKVLDFSTSYNAFKEMYHSIGQDIPWVDEEETFKNILLKKCGVKDKEKAFKDELFKNNSNKKTFEGTEENDILGTNSVITLLSGGTVTADKLFVQAEFQDKISISFKKNEDEFEQILTELDEYAEYLLKIRAVYDWAVLYEASQGQVYISKAKIEVYEQHKKDLAGLKAFIRKYCPDKYNEIFRDAGDNNYVAYSYNFNSLNLDEGEKRPKRKALQEDFCTYIRKIVKDIKCEMEDKEFYEDMGKRLELGTFMPKQVNTDNRVLPYQLYYFELARLLEKVSSYLPFINEKDSEGYITKEKLLSIMEFRIPYYVGPLHRDHKENNSFAWIKRKAQGRIYPWNYEEKIDLDASEQAFIDKMTNQCSYLPGEDVLPKYSLLYCKYEVLNEINNIKINGQRITVDCKKEIFGLFKRNKKVTVKRIRDFLVSNNYMSDSDEITGLDISVKSSLKSYHDFRRMLENKTVNEEDVEEIIKRLTYTEDKKRINKYLEENYPNISGEDRRYISKLKYKDFGRLSEKFLTGIKGVVKETGEILSVIQIMWETNDNLMQIIFSDHYTIKDALEREREDYYSEHPASVEQILSDMYVSNAVKRPIYRTLDIIGDVTKACQNAPRKIFVEMARGGGEKGKRTVSRRDKIKELYKHMDKQEVREISKEISELLGELDKKTDNELQSEVLFLYFMQLGICMYSGDPIDITKLKSDAYVNVDHIYPQAYVKDDSLNNKVLVKSKLNGEKSDNYPINKDIRDKMSSIWKHYRKEGLISEEKYNRLTRKTPFTDEEKQGFVNRQLVETRQSTKAVAEILKTMFPETEVVYVKAGLASEFRHAFGIIKSRQINDLHHAKDAYLNIVCGNVYHSTFTEKFFLKHQTYSIKTETVYKRKIEVDGKPIWNGQESLSFVIKMLGKNNIHYTRYAFCRTRGQNGGFFDQQPKSAGANLVPRKKNLPSEKYGGYNGTTVTYFIMAKYTEKVKKEKTDIMIVPVELLYSHNLLQNEEFAVNYIRQEIARITNKKQEEIVNISFPLGLRPLKVNTRLSFDGFEACMASKYSGGQKMGITSLVAFKMDADLEAYIKRIQSYMEKRKMNSSIELDEKYDKINNEKNEKLYNIILKKLEEPIYNKVFSGQLELVKAAKEKFLKLTLEQQCQCLSSLIDVFKTGRSGGCDLTLIGGKKQAAVCTVSSKVSNWKKNYTCVRIIDESASGIFRKESENILEWL

SEQ ID NO: 244 - protein, 553 aa, synthetic construct
  REGION 1..553: note = MG46-29 effector
MKKRAIEEYYLGLDIGTNSVGYAVTDPQYKILKYHGEPMWGSHVFEEGSQCAERRGFRTARRRLNRRQQRVRLVQEIFAHEIEKVDSRFFLRLKESALYREDANGNDPFTLFNDEGYTDKEYYFKYPTIHHLIMDLIDDENPHDVRLVYLAVAWLVAHRGHFLSDVEKTNVEKVLDFSTSYNALKEMYSGIGQDLPWIDEEETFKNILLKKCGVKDKEKAFKDKLLKNNSNKKNSDITEESEVLGISAVITLLSGGTVAADKLFVQAEFQDKISISFKKNEDEFEQILTELDEYAEYLLKIRAVYDWAVLYEASKGQVYISKAKIEVYEQHKKDLAGLKAFIRKYCPDKYNEIFRDAGDNNYVAYSYNFNSLNLTDGEKRPKRKASQEDFCTYIRKIVKDIKREMEDEEFYDDMWQRLELGTFMPKQVNTDNRVLPYQLYYFELARLLGRVSAYLPFINEKDNDGYITKEKLLSIMEFRIPYYVGPLHRENKDNNSFAWIKRKAQGRIYPWNYEEKIDLDASEQAFINKMTNQCSYLPGEDVLPKYSLLYCKY

SEQ ID NO: 245 - protein, 1381 aa, synthetic construct
  REGION 1..1381: note = MG46-30 effector
MKKRTIEEYYLGLDIGTNSVGYAVTDPQYKILKYHGEPMWGSHVFEEGSQCAERRGFRTARRRLNRRQQRVRFVQEIFAHEIEKVDSRFFLRIKESALYREDANGNDPFILFNDNGYTDKEYYLKYPTIHHLIMDLIDDENPHDVRLVYLAVAWLVAHRGHFLSDVEKTNVEKVLDFSTSYNAFKEMYHSIGQDIPWVDEEETFKNILLKKCGVKDKEKAFKDELFKNNSNKKTSEGTEENDKLGTNSVITLLSGGTVTADKLFVQAEFQDKISISFKKNEDEFEQILTELDEYAEYLLKIRAVYDWAVLYEASQGQVYISKAKIEVYEQHKKDLAGLKAFIRKYCPDKYNEIFRDAGDNNYVAYSYNFNSLNLDEGEKRPKRKASQEDFCTYIRKIVKDIKCEMEDKEFYEDMGKRLELGTFMPKQVNTDNRVIPYQLYYFELARLLEKVSSYLPFINEKDSEGYITKEKLLSIMEFRIPYYVGPLHRDHKEDNSFAWIKRKAQGRIYPWNYEEKIDLDASEQAFIDKMTNQCSYLPGEDVLPKYSLLYCKYEVLNEINNIKINGQRITVDCKKEIFGLFKRNKKVTVKRIRDFLVSNNYMSDSDEITGLDISVKSSLKSYHDFRRMLENKTVNEEDVEKIIKRLTYTEDKKRINKYLEENYPNISEEDRRYVSKLKYKDFGRLSEKFLTGIKGVVKETGEILSVIQIMWETNDNLMQIIFSDHYTIRDVLEREREDYYSEHPASVEQILSDMYVSNAVKRPIYRTLDIIGDVTKACQNAPRKIFVEMARGGGEKGKRTVSRRDKIKELYKHMDKQEVREISKEISELLGELDKKTDNELQSEVLFLYFMQLGICMYSGDPIDITKLKSDAYVNVDHIYPQAYVKDDSLNNKVLVKSKLNGEKSDNYPINRDIRDKMSSIWKHYRKEGLISEEKYNRLTRKTPFTDEEKQGFVNRQLVETRQSTKAVAEILKTMFPETEVVYVKAGLASEFRHAFGIIKSRQINDLHHAKDAYLNVVCGNVYHSTFTKKFFQNNLKYSIKTETVYKRKIEVDGKLIWNGQESLSFVIKMLGKNNIHYTRYAFCRTRGQNGGFFDQQSKPAGANLVPRKKNLPSEKYGGYNGTTVTYFIMAKYTEKVKKEKTDIMIVPVELLYSHNLLQNEEFAVNYIRQEIARITNKKQEEIVNISFPLGLRPLKVNTRLSFDGFEACIASKYSGGQKMGITSLVAFKMDADLEAYIKRIQSYMEKRKMNSSIELDEKYDKINNEKNEKLYNVILKKLEEPIYNKVFSGQLELVKAAKEKFLKLTLEQQCQCLSSLIDVFKTGRSGGCDLTLIGGKKQAAVCTVSSKVSNWKKNYRCVRIIDESASGIFRKESENILEWL

SEQ ID NO: 246 - protein, 966 aa, synthetic construct
  REGION 1..966: note = MG46-31 effector
MQIDEEDEEIYQDMMFRLETYTFMPKQVTGDNRVIPYQLYYDELKKILENAENYLPFLKKVDEQGISNKTKLLSIFEFRIPYYVGPLCSASKYAWLKRKSEGKIYPWNFEEKVDLDQSEEAFINRMTNNCSYLPGKTVLPQNSLLYCKFTVLNEINNLKINGIPISVECKQEIYKLFEENKKVTVDKIKKYLISNNYMEKEDVLGGIDITIKSSLKPQHDFKRLLHSKILNEKEVEQIIECITYSEEKSRVLRRLEREFPKLSDEDRRYLSKLKYSGFGRLSREFFTGIHGANKETGESFSIIQALWDTNDNLMQLLSDRYTFKDSIEEEQRQYYEEHPMTVESLLEEMYVSNAVKRPIYRTLDVIKDIQSVCKAAPKKIYVEMARGQEEGSSRKKSRKDQILELYKDMDKGEVRELSKQLEDCSERELRSEVLFLYFMQLGRSMYSGKPIDIEKLKTDVYNVDHIYPQCRVKDDSLSNKVLVLSEENGAKGDKYPISAVIRQNMGEMWRVYHEKGLISDEKYRRLTRVSAFSNAEKMEFINRQLVETRQSTKALTRIFRYIFPETEIVFVKAGLVSDFRNEVLKCAKSRIVNDLHHAKDAYLNIVAGEVYHARFTSKFFKIDQDEYSVKTKAIFGNKVWNGKELVWDGEKDIARVKKILTKNSVHYTRYAFERKGGLFDQQPLRAASGLIERKAGLDTEKYGGYNKSTASYFLLVKYAEAGKKPKQDVMFVPIDLMESEQIIKSESYAKYYVRNAIAHIIGKSREIVQEVSFPLGMRKMKVNTLLTLDGFEAILASKSNGGKTLVFGSMMPLFVNNKKEIYIKRLESFSKKKKQNNFLFVDEVYDKITKEENRELFLFLTNKVEEEPYCLIFGSQLQVLHDKENEFENLNLEQQVETLLNLLSIFKTGRTTGCDLKLLGGAGQAGIFTESSKLSNWKKSYKDVRIVDISAAGLHRKTSQNLLELL

SEQ ID NO: 247 - protein, 1376 aa, synthetic construct
  REGION 1..1376: note = MG46-32 effector
MKKRAIEEYYLGLDIGTNSVGYAVTDPQYKILKYHGEPMWGSHVFEEGSQCAERRGFRTARRRLNRRQQRVRLVQEIFAHEIEKVDTRFFLRLKESALYREDANGNDPFILFNDNGYTDKEYYLKYPTIHHLIMDLIDDENPHDVRLVYLAVAWLVAHRGHFLSDVEKTNVEKVLDFSTSYNALKEMYSGIGQDLPWIDEEETFKNILLKKCGVKDKEKAFKDKLLKNNSNKKNSDITEESEVLGISAVITLLSGGTVAADKLFVQAEFQDKISISFKKNEDEFEQILTELDEYAEYLLKIRAVYDWAVLYEASKGQVYISKAKIEVYEQHKKDLAGLKAFIRKYCPDKYNEIFRDAGDNNYVAYSYNFNSLNLTDGEKRPKRKASQEDFCTYIRKIVKDIKCEMEDEEFYDDMWQRLELGTFMPKQVNTDNRVLPYQLYYFELARLLGRVSAYLPFINEKDNDGYITKEKLLSIMEFRIPYYVGPLHRENKDNNSFAWIKRKAQGRIYPWNYEEKIDLDASEQAFINKMTNQCSYLPGEDVLPKYSLLYCKYEVLNEINNIKINGQKITVECKKGIFGLFKKNKKVTVKKIKDFLISNNYMGTSDEITGLDISVKSSLKSYHDFRKMLENKIVNEEDVEEIIKRLTYTEDKKRINRYLEENYPNISEEDRRYISKLKYKDFGRLSEKFLTGIKGVVKETGEILSVIQIMLETNDNLMQIIFSDHYMIKDALERERKDYYSEHPASVEQILSDMYISNAVKRPIYRTLDIISDVTKACQNAPRKIFVEMARGGGEKGKRTISRRDKIKELYKNMDKQEVREISKEISELLGELDKKTDNELQSEVLFLYFMQLGICMYSGDPIDITKLKSDAYVNVDHIYPQAYVKDDSLNNKVLVKSKLNGEKSDNYPINKDIRDKMSSIWKHYRKEGLISEEKYNRLTRKTPFTDEEKQGFVNRQLVETRQSTKAVAEILKMMFPETEVVYVKAGLASEFRHVFGIIKSRQINDLHHAKDAYLNVVCGNVYHSTFTKNFFLKHQTYSIKTETVYKRRIEADGKLIWNGQESLSFVKKMLGKNNIHYTRYAFCRKGGFFDQMPVTAKEGLVSRKKDLPSEKYGGYNKPTASYFIMAKYTEKVKKEKQDIMIVPVELMVGEKVLNDEKFAVDYIQQQIAQISNRKIEEIVNVSFPLGLRPLKVNTRFSFDGFEACVTGKSSGGRQLGMSSLMPLKISHEKESYIKKIENYINKKSKNPNIKPDEKYDGINSMINIKLYDELTDKLLNTCYRIVYKKTGDVILKGKEKFESLSIDVQCQTLMNIIDVLKTGRNGGCNLKDIGGTANAANYIINSRISNWKNYKSVKIIDESASGIFRKESENVLEWL

SEQ ID NO: 248 - protein, 1377 aa, synthetic construct
  REGION 1..1377: note = MG46-33 effector
MKKRTIEEYYLGLDIGTNSVGYAVTDPQYKILKYHGEPMWGSHVFEEGSQCAERRGFRTARRRLNRRQQRVRFVQEIFAHEIEKVDSRFFLRIKESALYREDANGNDPFILFNDNGYTDKEYYLKYPTIHHLIMDLIDDENPHDVRLVYLAVAWLVAHRGHFLSDVEKTNVEKVLDFSTSYNAFKEMYHSIGQDIPWVDEEETFKNILLKKCGVKDKEKAFKDELFKNNSNKKTSEGTEENDILGTNSVITLLSGGTVTADKLFVQAEFQDKISISFKKNEDEFEQILTELDEYAEYLLKIRAVYDWAVLYEASQGQVYISKAKIEVYEQHKKDLAGLKAFIRKYCPDKYNEIFRDAGDNNYVAYSYNFNSLNLDEGEKRPKRKALQEDFCTYIRKIVKDIKCEMEDKEFYEDMGKRLELGTFMPKQVNTDNRVLPYQLYYFELARLLEKVSSYLPFINEKDSEGYITKEKLLSIMEFRIPYYVGPLHRDHKENNSFAWIKRKAQGRIYPWNYEEKIDLDASEQAFIDKMTNQCSYLPGEDVLPKYSLLYCKYEVLNEINNIKINGQRITVDCKKGIFGLFKRNKKVTVKRIRDFLVSNNYMSDSDEITGLDISVKSSLKSYHDFRRMLENKTVNEEDVEEIIKRLTYTEDKKRINKYLEENYPNISEEDRRYISKLKYKDFGRLSEKFLTGIKGVVKETGEILSVIQIMWETNDNLMQIIFSDHYTIRDVLEREREDYYSEHPASVEQILSDMYISNAVKRPIYRTLDIIGDVTKACQNAPRKIFVEMARGGGEKGKRTVSRRDKIKELYKHMDKQEVREISKEISELLGELDKKTDNELQSEVLFLYFMQLGICMYSGDPIDITKLKSDAYVNVDHIYPQAYVKDDSLNNKVLVKSKLNGEKSDNYPINKDIRDKMSSIWKHYRKEGLISEEKYNRLTRKTPFTDEEKQGFVNRQLVETRQSTKAVAEILKTMFPKTEVVYVKAGLASEFRHAFGIIKSRQINDLHHAKDAYLNVVCGNVYHSTFTKKFFQNNPKYSIKTETVYKRKIEVDGKPIWNGQESLSFVIKMLGKNNIHYTRYAFCRKGGFFDQMPVTAKEGLVSRKKNLPSEKYGGYNKPTASYFIMAKYTEKVKKEKQDIMIVPVELMVGEKVLNDKNFAVGYIQQQIAQISNRKVEEIVNVSFPLGLRPLKVNTRFSFDGFEACVTGKDSGGKKISMSSLTSLKVSQANEKYIKKVERFAEKKEVNNKITLDEKYDEINENLNFEIYRMLQQKITKSCFGVAFGNLSNVFEKGENKFVALKTDMQCEVLLNIINVFKTGRSGTCNLKSIGGVEKAASYRISAKVSNWKKNYTCVKIIDESASGIFRKESENILEWL

SEQ ID NO: 249 - protein, 1377 aa, synthetic construct
  REGION 1..1377: note = MG46-34 effector
MKKRTIEEYYLGLDIGTNSVGYAVTDPQYKILKYHGEPMWGSHVFEEGSQCAERRGFRTARRRLNRRQQRVRFVQEIFAHEIEKVDSRFFLRIKESALYREDANGNDPFILFNDNGYTDKEYYLKYPTIHHLIMDLIDDENPHDVRLVYLAVAWLVAHRGHFLSDVEKTNVEKVLDFSTSYNAFKEMYHSIGQDIPWVDEEETFKNILLKKCGVKDKEKAFKDELFKNNSNKKTSEGTEENDKLGTNSVITLLSGGTVTADKLFVQAEFQDKISISFKKNEDEFEQILTELDEYAEYLLKIRAVYDWAVLYEASQGQVYISKAKIEVYEQHKKDLAGLKAFIRKYCPDKYNEIFRDAGDNNYVAYSYNFNSLNLDEGEKRPKRKASQEDFCTYIRKIVKDIKCEMEDKEFYEDMGKRLELGTFMPKQVNTDNRVIPYQLYYFELARLLEKVSSYLPFINEKDSEVYITKEKLLSIMEFRIPYYVGPLHRDHKEDNSFAWIKRKAQGRIYPWNYEEKIDLDASEQAFIDKMTNQCSYLPGEDVLPKYSLLYCKYEVLNEINNIKINGQRITVDCKKEIFGLFKRNKKVTVKRIRDFLVSNNYMSDSDEITGLDISVKSSLKSYHDFRRMLENKTVNEEDVEKIIKRLTYTEDKKRINKYLEENYPNISEEDRRYVSKLKYKDFGRLSEKFLTGIKGVVKETGEILSVIQIMWETNDNLMQIIFSDHYTIRDVLEREREDYYSEHPASVEQILSDMYVSNAVKRPIYRTLDIIGDVTKACQNAPRKIFVEMARGGGEKGKRTVSRRDKIKELYKHMDKQEVREISKEISELLGELDKKTDNELQSEVLFLYFMQLGICMYSGDPIDITKLKSDAYVNVDHIYPQAYVKDDSLNNKVLVKSKLNGEKSDNYPINRDIRDKMSSIWKHYRKEGLISEEKYNRLTRKTPFTDEEKQGFVNRQLVETRQSTKAVAEILKTMFPETEVVYVKAGLASEFRHAFGIIKSRQINDLHHAKDAYLNVVCGNVYHSTFTKKFFQNNLKYSIKTETVYKRKIEVDGKLIWNGQESLSFVIKMLGKNNIHYTRYAFCRKGGFFDQMPVTAKEGLVSRKKNLPSEKYGGYNKPTASYFIMAKYTEKVKKEKQDIMIVPVELMVGEKVLNDKNFAVGYIQQQIAQISNRKIEEIVNVSFPLGLRPLKVNTRFSFDGFEACVTGKSSGGRQLGMSSLESLKVSFVIESYIKKIENYINKKSENTKIILDEKYDGINRTFNIELYDELTNKLLNACYHIIYEKTGDVLLKGKEKFENLSIDAQCQTLMNIIDVLKTGRNGGCNLKDVGGAVNAANFIINSRVSNWKKVYNSVKIIDESASGIFRKESENILEWL

SEQ ID NO: 250 - protein, 1377 aa, synthetic construct
  REGION 1..1377: note = MG46-35 effector
MKKRTIEEYYLGLDIGTNSVGYAVTDPQYKILKYHGEPMWGSHVFEEGSQCAERRGFRTARRRLNRRQQRVRFVQEIFAHEIEKVDSRFYLRIKESALYREDANGNDPFILFNDNGYTDKEYYLKYPTIHHLIMDLIDDENPHDVRLVYLAVAWLVAHRGHFLSDVEKTNVEKVLDFSTSYNAFKEMYHSIGQDIPWVDKEETFKNILLKRCGVKDKEKAFKDELFKNNSNKKASEGTEENDILGTNAVITLLSGGTVTADKLFVQAEFQDKISISFKKNEDEFEQILTELDEYAEYLLKIRAVYDWAVLYEASQGQVYISKAKIEVYEQHKKDLAGLKAFIRKYCPDKYNEIFRDAGDNNYVAYSYNFNSLNLDEGEKRPKRKASQEDFCTYIRKIVKDIKCEIEDKEFYEDMGKRLELGTFMPKQVNTDNRVIPYQLYYFELARLLEKVSSYLPFINEKDSEGYITKEKLLSIMEFRIPYYVGPLHRDNKENNSFAWIKRKAQGRIYPWNYEEKIDLDASEQAFIDKMTNQCSYLPGEDVLPKYSLLYCKYEVLNEINNIKINGQKITVDCKKGIFGLFKRNKKVTVKRIRDFLVSNNYMSDSDEITGLDISVKSSLKSYHDFRRMLENKTVNEEDVEGIIKRLTYTEDKKRINKYLEENYPNISEEDRRYISKLKYKDFGRLSEKFLTGIKGVVKETGEILSVIQIMWETNDNLMQIIFSDHYTIRDVLEREREDYYSEHPASVEQILSDMYVSNAVKRPIYRTLDIIGDVTKACQNAPRKIFVEMARGGGEKGKRTVSRRDKIKELYKHMDKQEVREISKEISELLGELDKKTDNELQSEVLFLYFMQLGICMYSGDPIDITKLKSDAYVNVDHIYPQAYVKDDSLNNKVLVKSKLNGEKSDNYPINKDIRDKMSSIWKHYRKEGLISEEKYNRLTRKTPFTDEEKQGFVNRQLVETRQSTKAVAEILKTMFPETEVVYVKAGLASEFRHAFGIIKSRQINDLHHAKDAYLNVVCGNVYHSTFTKKFFQNNLKYSIKTETVYKRKIEVDGKPIWNGQESLSFVIKMLGKNNIHYTRYAFCRKGGFFDQMPVTAKEGLVSRKKNLPSEKYGGYNKPTASYFIMAKYTEKVKKEKQDIMIVPVELMVGEKVLNDKNFAVGYIQQQIAQISNRKVEEIINVSFPLGLRPLKVNTRFSFDGFEACVTGKDSGGKNISMSSLTSLKVSQANEKYIKKVERFAEKKEVNNKITLDEKYDEINENLNFEIYRMLQQKITKSCFGVAFGNLSNVFEKGENKFIALKTDMQCEVLLNIINVFKTGRSGTCNLKSIGGVEKAASYRISAKVSNWKKNYTCVKIINESASGIFRKESENILEWL

SEQ ID NO: 251 - protein, 1374 aa, synthetic construct
  REGION 1..1374: note = MG46-36 effector
MKKRAIEEYYLGLDIGTNSVGYAVTDPQYKILKYHGEPMWGSHVFEEGSQCAERRGFRTARRRLNRRQQRVRLVQEIFAHEIEKVDSRFFLRLKESALYREDANGNDPFILFNDNGYTDKEYYLKYPTIHHLIMDLIDDGNPHDVRLVYLAVAWLVAHRGHFLSDVEKTNVEKVLDFSTSYNALKEMYHGIGQDIPWIDEEETFKNILLKKCGVKDKEKAFKDELFKNTSNKKNSDKTEESEVLGTSAVITLLSGGTVTADKIFVQAEFQDKISISFKKNEDEFEQILTDLDEYAEYLLKIRAVYDWAVLYEASKGQVYISKAKIEVYEQHKKDLAGLKAFIRKYCPDKYNEIFRDAGDNNYVAYSYNFNSLNLADGEKRPKRKASQEDFCTYIRKIVKDIKCEMEDKEFYDDMRQRLELGIFMPKQVNTDNRVIPYQLYYFELARLLEKSSAYLPFINEKDDAGYITKEKLLSIMEYRTPYYVGPLHKENSSFAWIERKAKGRIYPWNYEEKIDLDASEQEFINKMTNQCSYLPGEDVLPKYSLLYCKYEVLNEINNIKVNGQKITVECKKQIFGLFKRNKKVTVKRIRDFLVSNNYMSASDEITGLDISVKSSLKSYHDFRRMLENKIVNEEDVEEIIKRLTYTEDKKRINKYLEENYPNISEEDRRYISKLKYKDFGRLSEKFLTEIKGVVKETGEILSVIQIMWETNDNLMQIIFSDHYTIRDVLERERKDYYSEHPAGVEQILSDMYVSNAVKRPIYRTLDIIGDVTKACQNAPRKIFVEMARGGGEKGKRTVSRRDKIKELYKNMDRQEVRKISKEISELLGELEKKSDNELQSEVLFLYFMQLGKCMYSGEPIDITKLKSDAYVNVDHIYPQAYVKDDSLNNKVLVKSKLNGEKSDKYPINKDIRDKMASTWKSYRKKGLISEEKYNRLTRKTPFTDEEKQGFVNRQLVETRQSTKAVAEILKMMFPETEVIYVKAGLASEFRHAFGIIKSRQINDLHHAKDAYLNVVCGNVYHSRFTKNFFLKHQTYSIKTETVYKKKIEVDGRLIWNGQESLSFVIKMLGKNNIHYTRYAFCRKGGFFDQMPVTAKEGLVSRKKDLPSEKYGGYNKPTASYFIMAKYTEKVKKEKQDIMIVPVELMVGEKVLNDEKFAVDYIQQQIAQISNRKIEEIVNVSFPLGLRPLKVNTRFSFDGFEACVTGKDSGGKQISMSSLTSLKVNQAYEKYIKKVERFVEKKEVNDKITLDEQYDGINKNMNLEIYRMLQQKIIRSCFLVAFSNLNNVFEKGENKFVALETDRQCEALLNMINVFKTGRSGTCNLKSIGGVEKAASYRISAKVSNWKKNYKCVKIIDESASGIFRKESENILEWL

SEQ ID NO: 252 - protein, 1381 aa, synthetic construct
  REGION 1..1381: note = MG46-37 effector
MKKRTIEEYYLGLDIGTNSVGYAVTDPQYKILKYHGEPMWGSHVFEEGSQCAERRGFRTARRRLNRRQQRVRFVQEIFAHEIEKVDSRFFLRIKESALYREDANGNDPFILFNDNGYTDKEYYLKYPTIHHLIMDLIDDENPHDVRLVYLAVAWLVAHRGHFLSDVEKTNVEKVLDFSTSYNAFKEMYHSIGQDIPWVDEEETFKNILLKKCGVKDKEKAFKDELFKNNSNKKTSEGTEENDKLGTNSVITLLSGGTVTADKLFVQAEFQDKISISFKKNEDEFEQILTELDEYAEYLLKIRAVYDWAVLYEASQGQVYISKAKIEVYEQHKKDLAGLKAFIRKYCPDKYNEIFRDAGDNNYVAYSYNFNSLNLDEGEKRPKRKASQEDFCTYIRKIVKDIKCEMEDKEFYEDMGKRLELGTFMPKQVNTDNRVIPYQLYYFELARLLEKVSSYLPFINEKDSEGYITKEKLLSIMEFRIPYYVGPLHRDHKEDNSFAWIKRKAQGRIYPWNYEEKIDLDASEQAFIDKMTNQCSYLPGEDVLPKYSLLYCKYEVLNEINNIKINGQRITVDCKKEIFGLFKRNKKVTVKRIRDFLVSNNYMSDSDEITGLDISVKSSLKSYHDFRRMLENKTVNEEDVEKIIKRLTYTEDKKRINKYLEENYPNISEEDRRYISKLKYKDFGRLSEKFLTGIKGVVKETGEILSVIQIMWETNDNLMQIIFSDHYTIRDVLEREREDYYSEHPASVEQILSDMYVSNAVKRPIYRTLDIIGDVTKACQNAPRKIFVEMARGGGEKGKRTVSRRDKIKELYKHMDKQEVREISKEISELLGELDKKTDNELQSEVLFLYFMQLGICMYSGDPIDITKLKSDAYVNVDHIYPQAYVKDDSLNNKVLVKSKLNGEKSDNYPINKDIRDKMSSIWKHYRKEGLISEEKYNRLTRKTPFTDEEKQGFVNRQLVETRQSTKAVAEILKTMFPETEVVYVKAGLASEFRHAFGIIKSRQINDLHHAKDAYLNVVCGNVYHSTFTKKFFQNNPKYSIKTETVYKRKIEVDGKPIWNGQESLSFVIKMLGKNNIHYTRYAFCRTRGQNGGFFDQQPKPAGANLVPRKKNLPSEKYGGYNGTTVTYFIMAKYTEKVKKEKTDIMIVPVELLYSHNLLQNEEFAVNYIRQEIARITNKKQEEIVNISFPLGLRPLKVNTRLSFDGFEACIASKKTYGQQLGMCSLMSLKLSEENMKYVKKIENYLNKKNANKNIIYDEKYDGINSMINIKLYDELTEKLLNTCYRIVYEKTGDIILKGKDKFSNLSFDLQCQILMNIIDVLKTGRNSGCNLKVIGGSVNAANYIINSRISNWKKDYNSVKIIDESASGIFRKESENILEWL

SEQ ID NO: 253 - protein, 396 aa, synthetic construct
  REGION 1..396: note = MG46-38 effector
MKAGLVSDFRNEVLECAKSRIVNDLHHAKDAYLNIVAGEVYHARFTAKFFKIDQDEYSVKTKVIFGNKVWCGKDLVWDGGKDIARVKKTLTKSSVHYTSYAFERKGGLFDQQPLRAASGLIERKAGLDTEKYGGYNKSTASYFLLVKYIEEGKKPKQDVMFVPIDLMESERIMDNKAYAKEYVRNTIAQIIGKPRDVVQEVSFPLGMRKIKVNTLLTFDGFEATLASKSNGGKTLVFGSMMPLFVDNKKESYIKRLESFAKKKKQNNSLLVDEVYDKITKEENRELFLFLTNKVKEMPYCLIFGSQLQVLHDKENEFENLNLEQQVETLLNVLSIFKTGRTTGCDLKALGGAGQAGIFTESSKLSNWKKSYKDVRIVDISAAGLHRKISQNLLELL

SEQ ID NO: 254 - protein, 1377 aa, synthetic construct
  REGION 1..1377: note = MG46-39 effector
MKKRAIEEYYLGLDIGTNSVGYAVTDPQYKILKYHGEPMWGSHVFEEGSQCAERRGFRTARRRLNRRQQRVRLVQEIFAHEIEKVDSRFFLRLKESALYREDANGNDPFILFNDEGYTDKEYYFKYPTIHHLIMDLIDDENPHDVRLVYLAVAWLVAHRGHFLSEVEKTNVEKVLDFSTSYNALKEMYSGIGQDLPWIDEEETFKNILLKKCGVKDKEKAFKDKLLKNNSNKKNSDITEESKVLGISAVITLLSGGTVAADKLFVQAEFQEKISISFKKNEDEFEQILTELDEYAEYLLKIRAVYDWAVLYEASKGQVYISKAKIEVYEQHKKDLAGLKAFIRKYCPDKYNEIFRDAGDNNYVAYSYNFNSLNLTDGEKRPKRKASQEDFCTYIRKIVKDIKCEMEDEEFYDDMWQRLELGTFMPKQVNTDNRVLPYQLYYFELARLLERASAYLPFINENDNDGYITKEKLLSIMEFRIPYYVGPLHRENKDNNSFAWIKRKAQGRIYPWNYEEKIDLDASEQAFINKMTNQCSYLPGEDVLPKYSLLYCKYEVLNEINNIRINGQKITVECKKGIFGLFKKNKKVTVKKIKDFLISNNYMGTSDEITGLDISVKSSLKSYHDFRKMLENKIVNEEDVEEIIKRLTYTEDKKRINRYLEENYPNISEEDRRYISKLKYKDFGRLSEKFLTGIKGVVKETGEILSVIQIMLETNDNLMQIIFSDHYMIKDALERERKDYYSEHPASVEQILSDMYISNAVKRPIYRTLDIISDVTKACQNAPRKIFVEMARGGGEKGKRTISRRDKIKELYKNMDKQEVREISKEISELLGELDKKTDNELQSEVLFLYFMQLGICMYSGDPIDITKLKSDAYVNVDHIYPQAYVKDDSLNNKVLVKSKLNGEKSDNYPINKDIRDKMSSIWKHYRKEGLISEEKYNRLTRKTPFTDEEKQGFVNRQLVETRQSTKAVAEILKMMFPETEVVYVKAGLASEFRHVFGIIKSRQINDLHHAKDAYLNVVCGNVYHSTFTKNFFLKHQTYSIKTETVYKRRIEADGKLIWNGQESLSFVKKMLGKNNIHYTRYAFCRKGGFFDQMPVTAKEGLVSRKKDLPSEKYGGYNKPTASYFIMAKYTEKGKKEKQDIMIVPVELMVGEKVLNDKKFAIGYIQQQIAQISNRKIEEIVNVSFPMGLRPLKVNTRFSFDGFEACVTGKANGGKILGISSLVALKMDNKKDNYIKKIEKYIEKRKLNINIKLDEKYDGINYESNQMIYNILVEKAQCSIYKTMFGSLVEGLENAKSIFEQLSLEEQCLCINSLINVFKTGRSSGCDLTLIGGKKQAAVCTVSSKVSNWKKNYKCVKIIDESASGIFRKESENILEWL

SEQ ID NO: 255 - protein, 1377 aa, synthetic construct
  REGION 1..1377: note = MG46-40 effector
MKKRTIEEYYLGLDIGTNSVGYAVTDPQYKILKYHGEPMWGSHVFEEGSQCAERRGFRTARRRLNRRQQRVRFVQEIFAHEIEKVDSRFYLRIKESALYREDANGNDPFILFNDNGYTDKEYYLKYPTIHHLIMDLIDDENPHDVRLVYLAVAWLVAHRGHFLSDVEKTNVEKVLDFSTSYNAFKEMYHSIGQDIPWVDEEEKFKNILLKRCGVKDKEKAFKDELFKNHSNKKASEGTEENDILGTNAVITLLSGGTVTADKLFVQAEFQDKISISFKKNEDEFEQILTELDEYAEYLLKIRAVYDWAVLYEASQGQVYISKAKIEVYEQHKKDLAGLKAFIRKYCPDKYNEIFRDAGDNNYVAYSYNFNSMNLDEGEKRPKRKASQEDFCTYIRKIVKDIKCEIEDKEFYEDMGKRLELGTFMPKQVNTDNRVIPYQLYYFELARLLEKVSSYLPFINEKDSEGYITKEKLLSIMEFRIPYYVGPLHRDNKENNSFAWIKRKAKGRIYPWNYEEKIDLDASEQAFIDKMTNQCSYLPGEDVLPKYSLLYCKYEVLNEINNIKINGQKITVDCKKGIFGLFKRNKKVTVKRIRDFLVSNNYMSDSDEITGLDISVKSSLKSYHDFRRMLENKTVNEEDVEEIIKRLTYTEDKKRINKYLEENYPNISEEDRRYISKLKYKDFGRLSEKFLTGIKGVVKETGEILSVIQIMWETNDNLMQIIFSDHYTIRDVLEREREDYYSEHPASVEQILSDMYVSNAVKRPIYRTLDIIGDVTKACQNAPRKIFVEMARGGGEKGKRTVSRRDKIKELYKHMDKQEVREISKEISELLGELDKKTDNELQSEVLFLYFMQLGICMYSGDPIDITKLKSDAYVNVDHIYPQAYVKDDSLNNKVLVKSKLNGEKSDNYPINKDIRDKMSSIWKHYRKEGLISEEKYNRLTRKTPFTDEEKQGFVNRQLVETRQSTKAVAEILKTMFPETEVVYVKAGLASEFRHAFGIIKSRQINDLHHAKDAYLNIVCGNVYHSTFTEKFFRNNPKYSIKTETVYKRKIEVDGKPIWNGQESLSFVIKMLGKNNIHYTRYAFCRKGGFFDQMPVTAKEGLVSRKKNLPSEKYGGYNKPTASYFIMAKYTEKVKKEKQDIMIVPVELMVGEKVLNDKNFAVGYIQQQIAQISNRKVEEIINVSFPLGLRPLKVNTRFSFDGFEACVTGKANGGKILGISSLVALKMDNKKDNYIKKIEKYIEKRKLNINIKLDEKYDGINYESNQMIYNILVEKIQCSIYKTMFGSLVEGLENAKSIFEQLSLEEQCLCINSLINVFKTGRSSGCDLTLIGGKKQAAVCTVSSKVSNWKKNHTCVKIIDESASGIFRKESENILEWL

SEQ ID NO: 256 - protein, 1377 aa, synthetic construct
  REGION 1..1377: note = MG46-41 effector
MKKRTIEEYYLGLDIGTNSVGYAVTDPQYKILKYHGEPMWGSHVFEEGSQCAERRGFRTARRRLNRRQQRVRFVQEIFAHEIEKVDSRFYLRIKESALYREDANGNDPFILFNDNGYTDKEYYLKYPTIHHLIMDLIDDENPHDVRLVYLAVAWLVAHRGHFLSDVEKTNVEKVLDFSTSYNAFKEMYHSIGQDIPWVDEEEKFKNILLKRCGVKDKEKAFKDELFKNHSNKKASEGTEENDILGTNAVITLLSGGTVTADKLFVQAEFQDKISISFKKNEDEIEQILTELDEYAEYLLKIRAVYDWAVLYEASQGQVYISKAKIEVYEQHKKDLAGLKAFIRKYCPDKYNEIFRDAGDNNYVAYSYNFNSMNLDEGEKRPKRKASQEDFCTYIRKIVKDIKCEIEDKEFYEDMGKRLELGTFMPKQVNTDNRVIPYQLYYFELARLLEKVSSYLPFINEKDSEGYITKEKLLSIMEFRIPYYVGPLHRDNKENNSFAWIKRKAKGRIYPWNYEEKIDLDASEQAFIDKMTNQCSYLPGEDVLPKYSLLYCKYEVLNEINNIKINGQKITVDCKKGIFGLFKRNKKVTVKRIRDFLVSNNYMSDSDEITGLDISVKSSLKSYHDFRRMLENKTVNEEDVEEIIKRLTYTEDKKRINKYLEENYPNISEEDRRYISKLKYKDFGRLSEKFLTGIKGVVKETGEILSVIQIMWETNDNLMQIIFSDHYTIRDVLEREREDYYSEHPASVEQILSDMYVSNAVKRPIYRTLDIIGDVTKACQNAPRKIFVEMARGGGEKGKRTVSRRDKIKELYKHMDKQEVREISKEISELLGELDKKTDNELQSEVLFLYFMQLGICMYSGDPIDITKLKSDAYVNVDHIYPQAYVKDDSLNNKVLVKSKLNEEKSDNYPINKDIRDKMSSIWKHYRKEGLISEEKYNRLTRKTPFTDEEKQGFVNRQLVETRQSTKAVAEILKTMFPETEVVYVKAGLASEFRHAFGIIKSRQINDLHHAKDAYLNIVCGNVYHSTFTEKFFRNNPKYSIKTETVYKRKIEVDGKPIWNGQESLSFVIKMLGKNNIHYTRYAFCRKGGFFDQMPVTAKEGLVSRKKNLPSEKYGGYNKPTASYFIMAKYTEKVKKEKQDIMIVPVELMVGEKVLNDKNFAVGYIQQQIAQISNRKVEEIINVSFPLGLRPLKVNTRFSFDGFEACVTGKANGGKILGISSLVALKMDNKKDNYIKKIEKYIEKRKLNINIKLDEKYDGINYESNQMIYNILVEKIQCSIYKTMFGSLVEGLENAKSIFEQLSLEEQCLCINSLINVFKTGRSSGCDLTLIGGKKQAAVCTVSSKVSNWKKNHTCVKIIDESASGIFRKESENILEWL

SEQ ID NO: 257 - protein, 1352 aa, synthetic construct
  REGION 1..1352: note = MG46-42 effector
MKENYYLGLDIGTNSVGYAVTDGGFNLLKYKGEPMWGSHVFEEGKQCSDRRMHRTARRRLDRRQQRVHLTQEIFAKAISEVDERFFIRLKESALFREDTSGRDTYIFFQDENYTDKEYHRDYPTIHHLIKELMEDTTPHDVRLVYLAVAWLMAHRGHFLSEVNKDNITELLDFDSIYGNLMELFTTPPWICSDKEEFKNILLLHQTIKNKERKFWGLLYEGKKPKTDEEDYINKEGMIRLLSGGTVEAGKLFNQKEFQEKISISLKKSEEDFQLLLDEMDEEDSEYLIRLRALYDWALLVDSLHGCSSISEAKVQDYIQHEADLKMLKSFVRKYCPNEYATIFKNAEKENYASYVYNIPKGKRTKEYKKKITQEEFCDYLKKKLKDMQIDEEDEEIYQDMMFRLETYTFMPKQVTGDNRVIPYQLYYDELKKILKNAENYLPFLKKEDEQGISNKTKLLSIFEFRIPYYVGPLCSTSKYAWLKRKSEGKIYPWNFEEKVDLDQSEEAFINRMTNNCSYLPGKTVLPQNSLLYCKFTVLNEINNLKINGIPISVECKQEIYKLFEENKKVTVDKIKKYLISNNYMTKEDVLGGIDITIKSSLKPQHDFKRLLHSKILNEKEVEQIIECITYSEEKSRVLRRLEREFPKLSDEDRRYLSKLKYSGFGRLSREFFTEICGVNKETGESFNIIQALWNTNDNLMQLLSDRYTFKESIEEEQHKYYEEHPMTVESLLEEMYVSNAVKRPIYRTLDVIKDIQSVCKAAPKKIYIEMARGQEEGSNRKRSRKDQILELYKNMDKGEVRELSKQLEDCSDRELRSEVLFLYFMQLGRSMYSGKPIDIEKRKTNAYDVDHIYPQCRVKDDSLSNKVLVLSEENRAKGDKYPISAVIRQNMGEMWRVYHEKGLISDEKYRRLTRVSAFSNAEKMEFINRQLVETRQSTKALTRIFRYIFPETEIVFVKAGLVSDFRNEVLKCAKSRIVNDLHHAKDAYLNIVAGEVYHARFTSKFFKIDQDEYSVKTKAIFGNKVWNGKELVWDGEKDIARVKKILTKNSVHYTRYAFERKGGLFDQQPLRAASGLIERKAGLDTEKYGGYNKSTASYFLLVKYAEAGKKPKQDVMFVPIDLMESEQIIKSESYAKYYVRNAIAHIIGKSREIVQEVSFPLGMRKMKVNTLLTLDGFEAILASKSNGGKTLVFGSMMPLFVNNKKEIYIKRLESFSKKKKQNNFLFVDEVYDKITKEENRELFLFLTNKVEEEPYCLIFGSQLQVLHDKENEFENLNLEQQVETLLNLLSIFKTGRTTGCDLKLLGGAGQAGIFTESSKLSNWKKSYKDVRIVDISVAGLHRKTSQNLLELL

SEQ ID NO: 258 - protein, 739 aa, synthetic construct
  REGION 1..739: note = MG71-1 active effector
MDNLILRREKMLVTKIKNTYPQISDDEIKAIKKLKYKDWGRLSATLLNSSTIAYEDKAFGELVTIISALRHTNKNFMELLSSYCSYDFIGKIKEFNGSRQSSNGKLTYKDVEELYVSPSAKRSIWQTLTILEEIKKIMGCEPKRIFIEMARSKEESKRTDSRLKKLQDLYKKCREENIDFMPRKDEFNALKTQLSSKKEEDLRSDKLYLYYTQMGRCMYTGERIELASLYDNNLYDIDHIYPRSKTKDDSLSNRVLVKKQVNAAKTDIYPLDAAIRTKMHSFWKLLYDKGFIDERKYERLTRSTQLRDEELAGFISRQLVETRQSTKAVAAILKTAYQNSEVVYVKAGNVSDFRQQFKFVKCRDVNDLHHAKDAYLNIVVGNCYHVKFTANPLNFITKNQDNRRYSLKPEIFYKFSIKRDGEIAWLGGEDGTMATVARTMHKNNILFTRQPLEGKGELFKQNPLKAKSGQLPLKAGLSVEKYGGYDSLTTAYFALVKSEGKQGSVQLSIEGIPLVYAKQGEKAVQDYLTEVVQLCKPEIKIPKIKKYSLFKINGFPMHISGRTGKQLVFYGAGQLCIADDVADYLKKALKHETDIAEKEKTLADQNADDIQKQKAQKGLDFYEQKWGISGAVNVQLYDMFIAKSANNLYKNRPASQTITLKEKREHFVKLTLSKQIHIIKEILNLFKCASASADFKLIDKGTSCGTLKISNNITKLKECILINQSPTGVFEQEVDLMKL

SEQ ID NO: 259 - protein, 493 aa, synthetic construct
  REGION 1..493: note = MG71-2 active effector
MFDNLDASKVNDFNAVFSEVENYVRDEMGIEDWSCQNIDELAKVLCDVNLGRTTKQKAMQSLLPAQTKQQKAIIQLFSGGKAKLAELFVDEELDECEKKSVSFQDDDLNEFEPVLTAALGERYEGLLRFKAIYDWSLLAKILHLDTSKKDEDEQHLLSECKMQVYEDHKRDLAVLKSMLKGKPLYNKIFRQDGDISYEKYAKGIKGRNQIDFCKDLKKQLEGIAEYKKIMQEITSIDDAKTEEERLLFRITNGFAFPKQTTKDNGIIPIQVHLAELKCILDNAEGYLPFLGETDNNGLSVREKIEQIVKFRIPYYVGPLAGTRMSREQGRCWVVRKNEKIYPWNFTEIVNLEESAEKFITNMTAKCTYLVGEDVLPKESLLYSEFMVRNAINNITVDGERLPVDVLEKIFKQLFLAKTSKVTKKTLERFFRQENISFQNIGGIDDKINASMKSYNDFRRIFGEDYIQLHRDEIENIIRWITLFCDEKKCWSLK

SEQ ID NO: 260 - protein, 1379 aa, synthetic construct
  REGION 1..1379: note = MG71-3 effector
MQKLKNCDYYIGLDMGDASVGWAVTDTNYNILKFNGKALWGIRLFDSANTAASTRVFRSGRRRIDRTTWRLKMLQELFADEIAKVDTGFFMRLEDSRLQLDDKREKAVYNLFVDKNYTDKDFYQQYPTMYHLRYALATQKGPFDVRLLYLAVQHIAKHRGHFLFDNLDASKVNDFNAVFSEVENYVRDEMGIEDWSCQNIDELAKVLCDVNLGRTTKQKAMQSLLPAQTKQQKAIIQLFSGGKAKLAELFVDEELDECEKKSVSFQDDDLNEFEPVLTAALGERYEGLLRFKAIYDWSLLAKILHLDTSKKDEDEQHLLSECKVQVYEDHKRDLAVLKSMLKGKPLYNKIFRQDGDISYEKYAKGIKGRNQIDFCKDLKKQLEGIAEYKKIMQEITNIDDAKTEEERLLFRITNGFAFPKQTTKDNGIIPIQVHLAELKCILDNAEGYLPFLGETDNNGLSVREKIEQIVKFRIPYYVGPLAGTRMSREQGRCWVVRKNEKIYPWNFTEIVNLEESAEKFITNMTAKCTYLVGEDVLPKESLLYSEFMVRNAINNITVDGERLPVDVLEKIFKQLFLAKTSKVTKKTLERFFRQENISFQNIGGIDDKINASMKSYNDFRRIFGEDYIQLHRDEIENIIRWITLFCDEKKMLVTKIKNTYPQISDDEIKAIKKLKYKDWGRLSATLLNSSTIAYEDKAFGELVTIISALRHTNKNFMELLSSYCSYDFIGKIKEFNGSRQSSNGKLTYKDVEELYVSPSVKRSIWQTLTILEEIKKIMGCEPKRIFIEMARSKEESKRTDSRLKKLQDLYKKCREENIDFMPRKDEFNALKTQLSSKKEEDLRSDKLYLYYTQMGRCMYTGERIELASLYDNNLYDIDHIYPRSKTKDDSLSNRVLVKKQVNAAKTDTYPIDAAIRTKMHSFWKLLYDKGFIDERKYERLTRSTQLRDEELAGFISRQLVETRQSTKAVATILKTAYQNSEIVYVKAGNVSDFRQQFKFIKCREVNDLHHAKDAYLNIVVGNCYHVKFTANPLNFITKNQDNRRYSLKPEIFYKFSIKRDNEIAWIGGKDGTITTVAKTMHKNNILFTRQPVEGKGELFKQQPLKAKSGQLPLKAGLSVEKYGGYDSLATAYFALVKSEGKKGAVQLSIEGIPLVYAKQGEKAVQNYLTDVVQLCKPEIKIPKIKKYSLFKINGFPMHISGRQLKQLQFYVASQLCIDEYSIAYLKKAFKYENNLAVNDEIIADKNADEEKKQKARKRLDFYEKTWGIGKENNMRIYDILLAKSANNLYKKRPASQSATLEKRRENFKGLFVSKQIHVLKEILNLFKCLSATADLQLLGAGKNVGKVTWNTNISNVKQCILINQSPTGIFEQEVDLMKL

SEQ ID NO: 261 - protein, 1379 aa, synthetic construct
  REGION 1..1379: note = MG71-4 effector
MQKLKNCDYYIGLDMGDASVGWAVTDTNYNILKFNGKALWGIRLFDSANTAASTRVFRSGRRRIDRTTWRLKMLQELFAKEIAKVDPGFFMRLEDSRLHLDDKRDKAVYNLFVDKNYTDKDFYQQYPTMYHLRYALATQAGPFDVRLLYLAVQHIAKHRGHFLFDNLDASKVNDFNAVFSEVENYVRDEMGIEDWSCQNIDELAKVLCDVNLGRTTKQKAMQSLLPAQTKQQKAIIQLFSGGKAKLAELFVDEELDECEKKSVSFQDDDLNEFEPVLTAALGERYEGLLRFKAIYDWSLLAKILHLDTSKKDEGEQHLLSECKVQVYEDHKRDLAVLKSMLKGKPLYNKIFRQDGDISYEKYAKGIKGRNQIDFCKDLKKQLEGIAEYKKIMQEITSIDDAKTEEERLLFRITNGFAFPKQTTKDNGIIPIQVHLAELKCILDNAEGYLPFLGETDNNGLSVREKIEQIVKFRIPYYVGPLAGTRMSKEQGRCWVVRKNEKIYPWNFTEIVNLEESAEKFITNMTAKCTYLVGEDVLPKESLLYSEFMVRNAINNITVDGERLPVDVLEKIFKQLFLAKTSKVTKKTLERFFRQENISFQNIGGIDDKINASMKSYNDFRRIFGEDYIQLHRDEIENIIRWITLFCDEKKMLVTKIKNTYPQISDDEIKAIKKLKYKDWGRLSATLLNSSTIAYEDKAFGELVTIISALRHTNKNFMELLSSYCSYDFIGKIKEFNGRRQSSNGKLTYKDVEDLYVSPSVKRSIWQTLTILEEIKKIMGCEPKRIFIEMARSKEESKRTDSRLKKLQDLYKKCREENIDFMPRKDEFNALKTQLSSKKEDDLRSDKLYLYYTQMGRCMYTGERIELASLYDNNLYDIDHIYPRSKTKDDSLSNRVLVKKQVNAAKTDTYPLDAAIRIKMHSFWKLLYDKGFIDERKYERLTRSTQLRDEELAGFISRQLVETRQSTKAVAAILKTAYKHSEVVYVKAGNVSDFRQQFKFVKCREVNDLHHAKDAYLNIVVGNCYYVKFTANPLNFIKKNQDSRSYSLKPEIFYKFNIKRDDDIAWLGGEDGTMATVARTMHKNNILFTRQAVEGKGELFKQNPLKANSGQLPLKAGLSIEKYGGYNSLTTAYFAVVKSEGKKGAVQLSIEAIPLVYAKQGEIAVQNYLTEVVQLCKPEIMLSKIKKYSLFKINGFPMHISGRTDNRILFYGAGQLCIDEADADYLKKALKYEADIAENELVIADTNADDIQKQNAQKRLDYYNQKWRIGRKINMHIYDMLLAKSGNSLYKNRPASQTTDLQEQRDVFEKLSLADQIHVIGEVLKLFKCASASANLKLLDKGNACGVIKVSNNILKFKQCILINQSPTGVFEQEVDLMKL

SEQ ID NO: 262 - protein, 1148 aa, synthetic construct
  REGION 1..1148: note = MG71-5 effector
MQKLQNKDYYIGLDMGDASVGWAVTDANYNILKVNGKALWGIRLFDSANTAASTRVFRSGRRRIDRTTWRLKILQELFAKEIAKVDPGFFMRLEDSRLHLDDKRDKAVYNLFVDKNYTDKDFYQQYPTMYHLRYALATQAGPFDVRLLYLAVQHIAKHRGHFLFDNLDASKVNNFNAVFSEVENYVRDEMGIEDWSCQNIDELAKVLCDVNLGRTTKQKAMQSLLPAQTKQQKAIIQLFSGGKAKLAELFVDEELDECEKKSVSFQDDDLNEFEPVLTAALGERYEGLLRFKAIYDWSLLAKILHLDTSKKDEGEQHLLSECKVQVYEDHKRDLAVLKSMLKGKPLYNKIFRQDGDISYEKYAKGIKGRNQIDFCKDLKKQLEGIAEYKKIMQEITSIDDAKTEEERLLFRITNGFAFPKQTTKDNGIIPIQVHLAELKCILDNAEGYLPFLGETDNNGLYVREKIEQIVKFRIPYYVGPLAGTRMSREQGRCWVVRKNEIIYPWNFTEIVNLEESAEKFITNMTAKCTYLVGEDVLPKESLLYSEFIVRNAINNITVDGERLPVDVLEKIFKQLFLAKTSKVTKKTLERFFRQENISFQNIGGIDDKINASMKSYNDFRRIFGEDYIQLHRDEIENIIRWITLFCDEKKMLVTKIKNTYPQISDDEIKAIKKLKYKDWGRLSATLLNSSTIAYEDKAFGELVTIISALRHTNKNFMELLSSYCSYDFIGKIKEFNGSRQSSNGKLTYKDVEELYVSPSVKRSIWQTLTILEEIKKIMGCEPKRIFIEMARSKEESKRTDSRLKKLQDLYKKCREENIDFMPRKDEFNALKTQLSSKKEEDLRSDKLYLYYTQMGRCMYTGERIELASLYDNNLYDIDHIYPRSKTKDDSLSNRVLVKKQVNAAKTDIYPLDAAIRTKMHSFWKLLYDKGFIDERKYERLTRSTQLRDEELAGFISRQLVETRQSTKAVAAILKTAYQNSEVVYVKAGNVSDFRQQFKFVKCRDVNDLHHAKDAYLNIVVGNCYHVKFTANPLNFITKNQDNRRYSLKPEIFYKFNIKRDDDIAWLGGEDGTMATVARTMHKNNILFTRQAVEGKGELFKQNPLKANSGQLPLKAGLSVEKYGGYDSLTTAYFAVVKSEGKKGLYSCQ

SEQ ID NO: 263 - protein, 208 aa, synthetic construct
  REGION 1..208: note = MG71-6 effector
MHLCNPIIKLNKIKKYSLFKINGFPMHISGRQGKQLIFYVAGQLCLDEESIAYLKKAFKYESDLAINEEIIDDKNAAEENKQKAHKRLDFYENTWGISEVANMQLYDILIAKSANNLYKNRPASQTSTLKQQRDMFAKLPLSKQIRVIKEAMNLFKCASATADFKLLGKGSVCGKIQVSTNITKCKQCILINQSPTGVFEQEVDLMKL

SEQ ID NO: 264 - protein, 74 aa, synthetic construct
  REGION 1..74: note = MG71-7 effector
MFDNLDASKVNDFNAVFSEVENYVRDEMGIEDWSCQNIDELAKVLCNVDLGRTTKQKAMQNLLPAQTKQQKAIL

SEQ ID NO: 265 - protein, 159 aa, synthetic construct
  REGION 1..159: note = MG71-8 effector
MQKLKNCDYYIGLDMGDASVGWAVTDTNYNILKFNGKALWGIRLFDSANTAASTRVFRSGRRRIDRTTWRLKMLQELFAEEIAKVDPGFFMRLEDSRLHLDDKRDKEVYNLFVDKNYTDKDFYQQYPTMYHLRYALATQAGPFDVRLLYLAVQQDKVST

SEQ ID NO: 266 - protein, 434 aa, synthetic construct
  REGION 1..434: note = MG71-9 effector
MQRLKNCDYYIGLDMGDASVGWAVTDTNYNILKFNGKALWGIRLFDSANTAASTRVFRSGRRRIDRTTWRLKMLQELFAEEIAKVDPGFFMRLEDSRLHLDDKRDKAVYNLFVDKNYTDKDFYQQYPTMYHLRYALATQAGPFDVRLLYLAVQHIAKHRGHFLFDNLDASKVNDFNAVFSEVENYVRDEMGIEDWSCQNIDELAKVLCDVNLGRTTKQKAMQSLLPAQTKQQKAIIQLFSGGKAKLAELFVDEELDECEKKSVSFQDDDLNEFEPVLTAALGERYEGLLRFKAIYDWSLLAKILHLDTSKKDEDEQHLLSECKVQVYEDHKRDLAVLKSMLKGKPLYNKIFRQDGDISYEKYAKGIKGCNQIDFCKDLKKQLEGIAEYKKIMQEITNIDDAKTEEERLLFRITNGFAFPKQTTKDNGIIPIRCI

SEQ ID NO: 267 - protein, 111 aa, synthetic construct
  REGION 1..111: note = MG71-10 effector
MDYFLFNFSGVQFHYTMSHLYKNRPASQTTDLQEQREFFEKLSLANQIHVIGEVLKLFKCASASANLKLLDKGNACGVIKVSNNILKFKQCVLINQSPTGVFEQEVDLMKL

SEQ ID NO: 268 - protein, 404 aa, synthetic construct
  REGION 1..404: note = MG71-11 effector
MQKLQNKDYYIGLDMGDASVGWAVTDANYNILKFNGKALWGIRLFDSANTAASTRVFRSGRRRIDRTTWRLKMLQELFADEIAKVDPGFFMRLEDSRLHLDDKRENAVYNLFVDKNYTDKEFHQQYPTMYHLRYALATKKGPFDIRLLYLAVQHIAKHRGHFLFDNLDASTVNDFNAVFSEVENYVHDEMGLEDWSCQNKDALAKVLCDVNLGRTTKQKAMQSLLPAKSKQQKAILQLFSGGKAKLAELFDDEELDDCEKKSISFQDDDLDEIEPVLTAALGERYEGLLRFKAIYDWSLLAKILHLDTGKKEEGEQHLLSECKVQVYEDHKRDLAVLKSMLKGKPLYNKIFRQDGDISYEKYAKGIKGRNQIDFCKDLKKQLEGIAEYKKIMQEITSIDDAKTE

SEQ ID NO: 269 - protein, 431 aa, synthetic construct
  REGION 1..431: note = MG71-12 effector
MQKLKNCDYYIGLDMGDASVGWAVTDTNYNILKFNGKALWGIRLFDSANTAASTRVFRSGRRRIDRTTWRLKMLQELFADEIAKVDTGFFMRLEDSRLQLDDKREKAAYNLFVDKSYTDKEFYQQYPTMYHLRYALATQKGPFDVRLLYLAVQHIAKHRGHFLFDNLDASKVNDFNAVFSEVENYVRDEMGIEDWSCQNIDEFAKVLCDVNLGRTTKQKAMQSLLPAQTKQQKAIIQLFSGGKAKLAELFVDEELDECEKKSVSFQDDDLNEFEPVLTAALGERYEGLLRFKAVYDWSLLAKILHLDTSKKDEDEQHLLSECKVQVYEDHKRDLAVLKSMLKGKPLYNKIFRQDGDISYEKYAKGIKGRNQIDFCKDLKKQLEGIAEYKKIMQEITNIDDAKTEEERLLFRITNGFAFPKQTTKDNGIIPI

SEQ ID NO: 270 - protein, 375 aa, synthetic construct
  REGION 1..375: note = MG71-13 effector
MQKLQNKDYYIGLDMGDASVGWAVTDANYNILKFNGKALWGIRLFDSANTAASTRVFRSGRRRIDRTTWRLKMLQELFAEEIAKVDPGFFMRLEDSRLHLDDKRDKAVYNLFVDKNYTDKDFYQQYPTMYHLRYALATQAGPFDVRLLYLAVQHIAKHRGHFLFDNLDASKVNDFNAVFSEVENYVRDEMGIEDWSCQNIDELAKVLCDVNLGRTTKQKAMQSLLPAQTKQQKAIIQLFSGGKAKLAELFVDEELDECEKKSVSFQDDDLNEFEPVLTAALGERYEGLLRFKAIYDWSLLAKILHLDTSKKDEDEQHLLSECKVQVYEDHKRDLAVLKSMLKGKPLYNKIFRQDGDISYEKYAKGIKGRNGTWLF

SEQ ID NO: 271 - protein, 612 aa, synthetic construct
  REGION 1..612: note = MG71-14 effector
MQKLKNCDYYIGLDMGDASVGWAVTDTNYNILKFNGKALWGIRLFDSANTAASTRVFRSGRRRIDRTTWRLKMLQELFAEEIAKVDPGFFMRLEDSRLHLDDKRDKAVYNLFVDKNYTDKDFYQQYPTMYHLRYALAMQAGPFDVRLLYLAVQHIAKHRGHFLFDNLDASKVNDFNAVFSEVENYVRDEMGIEDWSCQNIDELAKVLCDVNLGRTTKQKAMQSLLPAQTKQQKAIIQLFSGGKAKLAELFGDAELDECEKKSVSFQDDDLDELEPVLTAALGERYEGLLRFKAIYDWSLLAKILHLDTSKKDEDEQHLLSECKVQVYEDHKRDLAVLKSMLKGKPLYNKIFRQDGDISYEKYAKGIKGRNQIDFCKDLKKQLEGIAEYKKIMQEITSIDDAKTEEERLLFRITNGFAFPKQTTKDNGIIPIQVHLAELKCILDNAEGYLPFLGETDNNGLSVREKIEQIVKFRIPYYVGPLAGTRMSREQGRCWVVRKNEKIYPWNFTEIVNLEESAEKFITNMTAKCTYLVGEDVLPKESLLYSEFMVRNAINNITVDGERLPVDVLEKIFKQLFLAKTSKVTKKTLERFLGRKIFLSKTLVALMIRLMLR

SEQ ID NO: 272 - protein, 252 aa, synthetic construct
  REGION 1..252: note = MG71-15 effector
MTTAYFAVVKSEGKKGAVQLSIEAIPLVYAKQGEIAVQKYLTKVVQLCKPAIMLPKIKKYSLFKINGFPMHISGRTGNRMLFYGAGQLCLDEADVDYLKKALKYENDIAENELVIADKNSDDIQKQQAQKNLDYYNQKWRIGRKVNMHIYDMLLAKSGNNLYKNRPASQTTDLQEQREFFEKLSLANQIHVIGEVLKLFKCASASANLKLLDKGNACGVIKVSNNILKFKQCVLINQSPTGVFEQEVDLMKL

SEQ ID NO: 273 - protein, 1379 aa, synthetic construct
  REGION 1..1379: note = MG71-16 effector
MQKLKNCDYYIGLDMGDASVGWAVTDTNYNILKFNGKALWGIRLFDSANTAASTRVFRSGRRRIDRTTWRLKMLQELFAEEIAKVDPGFFMRLEDSRLHLDDKRDKAVYNLFVDKNYTDKDFYQQYPTMYHLRYALATQAGPFDVRLLYLAVQHIAKHRGHFLFDNLDASKVNDFNAVFSEVENYVRDEMGIEDWSCQNIDELAKVLCDVNLGRTTKQKAMQSLLPAQTKQQKAIIQLFSGGKAKLAELFVDAELDECEKKSVSFQDDDLNEFEPVLTAALGERYEGLLRFKAIYDWSLLAKILHLDTSKKDEDEQHLLSECKVQVYEDHKRDLAVLKSMLKGKPLYNKIFRQDGDISYEKYAKGIKGRNQIDFCKDLKKQLEGIAEYKKIMQEITSIDDAKTEEERVLFRITNGFAFPKQTTKDNGIIPIQVHLAELKCILDNVEGYLPFLGETDNNGLSVREKIEQIVKFRIPYYVGPLAGTRMSREQGRYWVVRKNEKIYPWNFTEIVNLKESAEKFITNMTAKCTYLVGEDVLPKESLLYSEFMVRNAINNITVDGERLPVDVLEKIFKQLFLAKTSKVTKKTLERFFRQENISFQNIGGIDDKINASMKSYNDFRRIFGEDYIQLHRDEIENIIRWITLFCDEKKMLVTKIKNTYPQISDDEIKAIKKLKYKDWGRLSATLLNSSAIAYEDKAFGELVTIISALRHTNKNFMELLSSYCSYDFIGKIKEFNGSRQSSNGKLTYKDVEELYVSPSVKRSIWQTLTILEEIKKIMGCEPKRIFIEMARSKEESKRTDSRLKKLQDLYKKCREENIDFMPRKDEFNTLKTQLSSKKEDDLRSDKLYLYYTQMGRCMYTGEKIELASLYDNNLYDIDHIYPRSKTKDDSLSNRVLVKKQVNAAKTDIYPLDAAIRTKMHSFWKLLYDKGFIDERKYQRLTRSTQLRDEELAGFISRQLVETRQSTKAVAAILKTAYQNSEVVYVKAGNVSDFRQQFKFVKCREVNDLHHAKDAYLNIVVGNCYHVKFTANPLNFITKNQDNRRYSLKPEIFYKFSIKRDGEIAWLGGEDGTMATVARTMHKNNILFTRQAVEGKGELFDQQPLKAKGGQLPLKAGLSIEKYGGYNSLTTAYFAVVKSEGKKGAVQLSIEAIPLVYAKQGEIAVQKYLTKVVQLCKPEIMLPKIKKYSLFKINGFPMHISGRTGNRMLFYGAGQLCLDEADVDYLKKALKYENDIAENELVIADKNSDDIQKQQAQKNLDYYNQKWRIGRKVNMHIYDMLLAKSGNNLYKNRPASQTTDLQEQREFFEKLSLANQIHVIGEVLKLFKCASASANLKLLDKGNACGVIKVSNNILKFKQCVLINQSPTGVFEQEVDLMKL

SEQ ID NO: 274 - protein, 1379 aa, synthetic construct
  REGION 1..1379: note = MG71-17 effector
MQKLKNCDYYIGLDMGDASVGWAVTDTNYNILKFNGKALWGIRLFDSANTAASTRVFRSGRRRIDRTTWRLKMLQELFAEEIAKVDPGFFMRLEDSRLHLDDKRDKEVYNLFVDKNYTDKDFYQQYPTMYHLRYALATQAGPFDVRLLYLAVQHIAKHRGHFLFDNLDASKVNDFNAVFSEVENYVRDEMGIEDWSCQNIDELAKVLCDVNLGRTTKQKAMQSLLPAQTKQQKAIIQLFSGGKAKLAELFVDAELDECEKKSVSFQDDDLNEFEPVLTAALGERYEGLLRFKAIYDWSLLAKILHLDTSKKDEDEQHLLSECKVQVYEDHKRDLAVLKSMLKGKPLYNKIFRQDGDISYEKYAKGIKGRNQIDFCKDLKKQLEGIAEYKKIMQEITSIDDAKTEEERVLFRITNGFAFPKQTTKDNGIIPIQVHLAELKCILDNVEGYLPFLGETDNNGLSVREKIEQIVKFRIPYYVGPLAGTRMSREQGRYWVVRKNEKIYPWNFTEIVNLEESAEKFITNMTAKCTYLVGEDVLPKESLLYSEFMVRNAINNITVDGERLPVDVLEKIFKQLFLAKTSKVTKKTLERFFRQENISFQNIGGIDDKINASMKSYNDFRRIFGEDYIQLHRDEIENIIRWITLFCDEKKMLVTKIKNTYPQISDDEIKAIKKLKYKDWGRLSATLLNSSAIAYEDKAFGELVTIISALRHTNKNFMELLSSYCSYDFIGKIKEFNGSRQSSNGKLTYKDVEELYVSPSVKRSIWQTLTILEEIKKIMGCEPKRIFIEMARSKEESKRTDSRLKKLQDLYKKCREENIDFMPRKDEFNTLKTQLSSKKEDDLRSDKLYLYYTQMGRCMYTGEKIELASLYDNNLYDIDHIYPRSKTKDDSLSNRVLVKKQVNAAKTDIYPLDAAIRTKMHSFWKLLYDKGFIDERKYQRLTRSTQLRDEELAGFISRQLVETRQSTKAVAAILKTAYQNSEVVYVKAGNVSDFRQQFKFVKCREVNDLHHAKDAYLNIVVGNCYHVKFTANPLNFITKNQDNRRYSLKPEIFYKFSIKRDGEIAWLGGEDGTMATVARTMHKNNILFTRQAVEGKGELFDQQPLKAKGGQLPLKAGLSIEKYGGYNSLTTAYFAVVKSEGKKGAVQLSIEAIPLVYAKQGEIAVQKYLTKVVQLCKPEIMLPKIKKYSLFKINGFPMHISGRTGNRMLFYGAGQLCLDEADVDYLKKALKYENDIAENELVIADKNSDDIQKQQAQKNLDYYNQKWRIGRKVNMHIYDMLLAKSGNNLYKNRPASQTTDLQEQREFFEKLSLANQIHVIGEVLKLFKCASASANLKLLDKGNACGVIKVSNNILKFKQCVLINQSPTGVFEQEVDLMKL

SEQ ID NO: 275 - protein, 1379 aa, synthetic construct
  REGION 1..1379: note = MG71-18 effector
MQKLKNCDYYIGLDMGDASVGWAVTDTNYNILKFNGKALWGIRLFDSANTAASTRVFRSGRRRIDRTTWRLKMLQELFAEEIAKVDPGFFMRLEDSRLHLDDKRDKAVYNLFVDKNYTDKDFYQQYPTMYHLRYALATQAGPFDVRLLYLAVQHIAKHRGHFLFDNLDASKVNDFNAVFSEVENYVRDEMGIEDWSCQNIDELAKVLCDVNLGRTTKQKAMQSLLPAQTKQQKAIIQLFSGGKAKLAELFVDAELDECEKKSVSFQDDDLNEFEPVLTAALGERYEGLLRFKAIYDWSLLAKILHLDTSKKDEDEQHLLSECKVQVYEDHKRDLAVLKSMLKGKPLYNKIFRQDGDISYEKYAKGIKGRNQIDFCKDLKKQLEGIAEYKKIMQEITSIDDAKTEEERVLFRITNGFAFPKQTTKDNGIIPIQVHLAELKCILDNVEGYLPFLGKTDNNGLSVREKIEQIVKFRIPYYVGPLAGTRMSREQGRYWVVRKNEKIYPWNFTEIVNLEESAEKFITNMTAKCTYLVGEDVLPKESLLYSEFMVRNAINNITVDGERLPVDVLEKIFKQLFLAKTSKVTKKTLERFFRQENISFQNIGGIDDKINASMKSYNDFRRIFGEDYIQLHRDEIENIIRWITLFCDEKKMLVTKIKNTYPQISDDEIKAIKKLKYKDWGRLSATLLNSSAIAYEDKAFGELVTIISALRHTNKNFMELLSSYCSYDFIGKIKEFNGSRQSSNGKLTYKDVEELYVSPSVKRSIWQTLTILEEIKKIMGCEPKRIFIEMARSKEESKRTDSRLKKLQDLYKKCREENIDFMPRKDEFNTLKTQLSSKKEDDLRSDKLYLYYTQMGRCMYTGEKIELASLYDNNLYDIDHIYPRSKTKDDSLSNRVLVKKQVNAAKTDIYPLDAAIRTKMHSFWKLLYDKGFIDERKYQRLTRSTQLRDEELAGFISRQLVETRQSTKAVAAILKTAYQNSEVVYVKAGNVSDFRQQFKFVKCREVNDLHHAKDAYLNIVVGNCYHVKFTANPLNFITKNQDNRRYSLKPEIFYKFSIKRDGEIAWLGGEDGTMATVARTMHKNNILFTRQAVEGKGELFDQQPLKAKGGQLPLKAGLSIEKYGGYNSLTTAYFAVVKSEGKKGAVQLSIEAIPLVYAKQGEIAVQKYLTKVVQLCKPEIMLPKIKKYSLFKINGFPMHISGRTGNRMLFYGAGQLCLDEADVDYLKKALKYENDIAENELVIADKNSDDIQKQQAQKNLDYYNQKWRIGRKVNMHIYDMLLAKSGNNLYKNRPASQTTDLQEQREFFEKLSLANQIHVIGEVLKLFKCASASANLKLLDKGNACGVIKVSNNILKFKQCVLINQSPTGVFEQEVDLMKL

SEQ ID NO: 276 - protein, 1379 aa, synthetic construct
  REGION 1..1379: note = MG71-19 effector
MQKLKNCDYYIGLDMGDASVGWAVTDTNYNILKFNGKALWGIRLFDSANTAASTRVFRSGRRRIDRTTWRLKMLQELFAEEIAKVDPGFFMRLEDSRLHLDDKRDKAVYNLFVDKNYTDKDFYQQYPTMYHLRYALATQAGPFDVRLLYLAVQHIAKHRGHFLFDNLDASKVNDFNAVFSEVENYVRDEMGIEDWSCQNIDELAKVLCDVNLGRTTKQKAMQSLLPAQTKQQKAIIQLFSGGKAKLAELFVDAELDECEKKSVSFQDDDLNEFEPVLTAALGERYEGLLRFKAIYDWSLLAKILHLDTSKKDEDEQHLLSECKVQVYEDHKRDLAVLKSMLKGKPLYNKIFRQDGDISYEKYAKGIKGRNQIDFCKDLKKQLEGIAEYKKIMQEITSIDDAKTEEERVLFRITNGFAFPKQTTKDNGIIPIQVHLAELKCILDNVEGYLPFLGETDNNGLSVREKIEQIVKFRIPYYVGPLAGTRMSREQGRYWVVRKNEKIYPWNFTEIVNLEESAEKFITNMTAKCTYLVGEDVLPKESLLYSEFKVRNAINNITVDGERLPVDVLEKIFKQLFLAKTSKVTKKTLERFFRQENISFQNIGGIDDKINASMKSYNDFRRIFGEDYIQLHRDEIENIIRWITLFCDEKKMLVTKIKNTYPQISDDEIKAIKKLKYKDWGRLSATLLNSSAIAYEDKAFGELVTIISALRHTNKNFMELLSSYCSYDFIGKIKEFNGSRQSSNGKLTYKDVEELYVSPSVKRSIWQTLTILEEIKKIMGCEPKRIFIEMARSKEESKRTDSRLKKLQDLYKKCREENIDFMPRKDEFNTLKTQLSSKKEDDLRSDKLYLYYTQMGRCMYTGEKIELASLYDNNLYDIDHIYPRSKTKDDSLSNRVLVKKQVNAAKTDIYPLDAAIRTKMHSFWKLLYDKGFIDERKYQRLTRSTQLRDEELAGFISRQLVETRQSTKAVAAILKTAYQNSEVVYVKAGNVSDFRQQFKFVKCREVNDLHHAKDAYLNIVVGNCYHVKFTANPLNFITKNQDNRRYSLKPEIFYKFSIKRDGEIAWLGGEDGTMATVARTMHKNNILFTRQAVEGKGELFDQQPLKAKGGQLPLKAGLSIEKYGGYNSLTTAYFAVVKSEGKKGAVQLSIEAIPLVYAKQGEIAVQKYLTKVVQLCKPEIMLPKIKKYSLFKINGFPMHISGRTGNRMLFYGAGQLCLDEADVDYLKKALKYENDIAENELVIADKNSDDIQKQQAQKNLDYYNQKWRIGRKVNMHIYDMLLAKSGNNLYKNRPASQTTDLQEQREFFEKLSLANQIHVIGEVLKLFKCASASANLKLLDKGNACGVIKVSNNILKFKQCVLINQSPTGVFEQEVDLMKL

SEQ ID NO: 277 - protein, 1379 aa, synthetic construct
  REGION 1..1379: note = MG71-20 effector
MQKLKNCDYYIGLDMGDASVGWAVTDTNYNILKFNGKALWGIRLFDSANTAASTRVFRSGRRRIDRTTWRLKMLQELFAEEIAKVDPGFFMRLEDSRLHLDDKRDKEVYNLFVDKNYTDKDFYQQYPTMYHLRYALATQAGPFDVRLLYLAVQHIAKHRGHFLFDNLDASKVNDFNAVFSEVENYVRDEMGIEDWSCQNIDELAKVLCDVNLGRTTKQKAMQSLLPAQTKQQKAIIQLFSGGKAKLAELFVDAELDECEKKSVSFQDDDLNEFEPVLTAALGERYEGLLRFKAIYDWSLLAKILHLDTSKKDEDEQHLLSECKVQVYEDHKRDLAVLKSMLKGKPLYNKIFRQDGDISYEKYAKGIKGRNQIDFCKDLKKQLEGIAEYKKIMQEITSIDDAKTEEERVLFRITNGFAFPKQTTKDNGIIPIQVHLAELKCILDNVEGYLPFLGETDNNGLSVREKIEQIVKFRIPYYVGPLAGTRMSREQGRYWVVRKNEKIYPWNFTEIVNLEESAEKFITNMTAKCTYLVGEDVLPKESLLYSEFMVRNAINNITVDGERLPVDVLEKIFKQLFLAKTSKVTKKTLERFFRQENISFQNIGGIDDKINASMKSYNDFRRIFGEDYIQLHRDEIENIIRWITLFCDEKKMLVTKIKNTYPQISDDEIKAIKKLKYKDWGRLSATLLNSSAIAYEDKAFGELVTIISALRHTNKNFMELLSSYCSYDFIGKIKEFNGSRQSSNGKLTYKDVEELYVSPSVKRSIWQTLTILEEIKKIMGCEPKRIFIEMARSKEESKRTDSRLKKLQDLYKKCREENIDFMPRKDEFNTLKTQLSSKKEDDLRSDKLYLYYTQMGRCMYTGEKIELASLYDNNLYDIDHIYPRSKTKDDSLSNRVLVKKQVNAAKTDTYPLDAAIRTKMHSFWKLLYDKGFIDERKYQRLTRSTQLRDEELAGFISRQLVETRQSTKAVAAILKTAYQNSEVVYVKAGNVSDFRQQFKFVKCREVNDLHHAKDAYLNIVVGNCYHVKFTANPLNFITKNQDNRRYSLKPEIFYKFSIKRDGEIAWLGGEYGTMATVARTMHKNNILFTRQAVEGKGELFDQQPLKAKGGQLPLKAGLSIEKYGGYNSLTTAYFAVVKSEGKKGAVQLSIEAIPLVYAKQGEIAVQKYLTKVVQLCKPAIMLPKIKKYSLFKINGFPMHISGRTGNRMLFYGAGQLCLDEADVDYLKKALKYENDIAENELVIADKNSDDIQKQQAQKNLDYYNQKWRIGRKVNMHIYDMLLAKSGNNLYKNRPASQTTDLQEQREFFEKLSLANQIHVIGEVLKLFKCASASANLKLLDKGNACGVIKVSNNILKFKQCVLINQSPTGVFEQEVDLMKL

SEQ ID NO: 278 - protein, 140 aa, synthetic construct
  REGION 1..140: note = MG71-21 effector
MVIADKNSDDIQKQQAQKNLDYYNQKWRIGRKVNMHIYDMLLAKSGNNLYKNRPASQTTDLQEQIEFFEKLSLANQIHVIGEVLKLFKCASASANLKLLDKGNACGVIKVSNNILKFKQCVLINQSPTGVFEQEVDLMKL

SEQ ID NO: 279 - protein, 393 aa, synthetic construct
  REGION 1..393: note = MG71-22 effector
MQKLKNCDYYICLDMGDASVGWAVTDTNYNILKFNGKALWGIRLFDSANTAASTRVFRSGRRRIDRTTWRLKMLQELFAEEIAKVDPGFFMRLEDSRLHLDDKRDKAVYNLFVDKNYTDKDFYQQYPTMYHLRYALATQAGPFDVRLLYLAVQHIAKHRGHFLFDNLDASKVNDFNAVFSEVENYVRDEMGIEDWSCQNIDELAKVLCDVNLGRTTKQKAMQSLLPAQTKQQKAIIQLFSGGKAKLAELFVDAELDECEKKSVSFQDDDLNEFEPVLTAALGERYEGLLRFKAIYDWSLLAKILHLDTSKKDEDEQHLLSECKVQVYEDHKRDLAVLKSMLKGKPLYNKIFRQDGDISYEKYAKGIKGRNQIDFCKDLKKQLEGIAVYKNIMQ

SEQ ID NO: 280 - protein, 139 aa, synthetic construct
  REGION 1..139: note = MG71-23 effector
MIADKNSDDIQKQQAQKNLDYYNQKWRIGRKVNMHIYDMLLAKSGNNLYKNRPASQTTDLQEQREFFEKLSLANQIHVIGEVLKLFKCASASANLKLLDKGNACGVIKVSNNILKFKQCVLINQSPTGVFEQEVDLMKL

SEQ ID NO: 281 - protein, 1042 aa, synthetic construct
  REGION 1..1042: note = MG71-24 effector
MQKLKNCDYYIGLDMGDASVGWAVTDTNYNILKFNGKALWGIRLFDSANTAASTRVFRSGRRRIDRTTWRLKMLQELFAEEIAKVDPGFFMRLEDSRLHLDDKRDKAVYNLFVDKNYTDKDFYQQYPTMYHLRYALATQAGPFDVRLLYLAVQHIAKHRGHFLFDNLDASKVNDFNAVFSEVENYVRDEMGIEDWSCQNIDELAKVLCDVNLGRTTKQKAMQSLLPAQTKQQKAIIQLFSGGKAKLAELLVDAELDECEKKSVSFQDDDLNEFEPVLTAALGERYEGLLRFKAIYDWSLLAKILHLDTSKKDEDEQHLLSECKVQVYEDHKRDLAVLKSMLKGKPLYNKIFRQDGDISYEKYAKGIKGRNQIDFCKDLKKQLEGIAEYKKIMQEITSIDDAKTEEERVLFRITNGFAFPKQTTKDNGIIPIQVHLAELKCIHDNVEGYLPFLGETDNNGLSVREKIEQIVKFRIPYYVGPLAGTRMSREQGRYWVVRKNEKIYPWNFTEIVNLEESAEKFITNMTAKCTYLVGEDVLPKESLLYSEFMVRNAINNITVDGERLPVDVLEKIFKQLFLAKTSKVTKKTLERFFRQENISFQNIGGIDDKINASMKSYNDFRRIFGEDYIQLHRDEIENIIRWITLFCDEKKMLVTKIKNTYPQISDDEIKAIKKLKYKDWGRLSATLLNSSAIAYEDKAFGELVTIISALRHTNKNFMELLSSYCSYDFIGKIKEFHGSRQSSNGKLTYKDVEELYVSPSVKRSIWQTLTILEEIKKIMGCEPKRIFIEMARSKEESKRTDSRLKKLQDLYKKCREENIDFMPRKDEFNTLKTQLSSKKEDDLRSDKLYLYYTQMGRCMYTGEKIELASLYDNNLYDIDHIYPRSKTKDDSLSNRVLVKKQVNAAKTDIYPLDAAIRTKMHSFWKLLYDKGFIDERKYQRLTRSTQLRDEELAGFISRQLVETRQSTKAVAAILKTAYQNSEVGYVKAGNVSDFRQQFKFVKCREVNDLHHAKDAYLNIVVGNCYHVKFTANPLNFITKNQDN

SEQ ID NO: 282 - protein, 307 aa, synthetic construct
  REGION 1..307: note = MG71-25 effector
MATVARTMHKNNILFTRQAVEGKGELFDQQPLKAKGGQLPLKAGLSIEKYGGDNSLTTAYFAVVKSEGKKGAVQLSIDAIPLVYGKQGEIAVQKYLTKVVQLCKPEIMLPKIKKYSLFKINGFPMHISGRTGNRMLFYGAGQLCLDEADVDYLKKALKYENDIAENELVIADKNSDDIQKQQAQKNLDYYNQKWRIGRKVNMHIYDMLLAKSGNNLYKNRPASQTTDLQEQREFFEKLSLANQIHVIGEVLKLFKCASASANLKLLDKGNACGVIKVSNNILKFKQCVLINQSPTGVFEQEVDLMKL

SEQ ID NO: 283 - protein, 918 aa, synthetic construct
  REGION 1..918: note = MG71-26 effector
MREKIEQIVKFRIPYYVGPLAGTRMYREQCRYWVVRKNEKIYPWNFTEIVNLEESAEKFITNMTAKCTYLVGEDVLPKESLLYSEFMVRNAINNITVDGERLPVDVLEKIFKQLFLAKTSKVTKKTLERFFRQENISFQNIGGIDDKINASMKSYNDFRRIFGEDYIQLHRDEIENIIRWITLFCDEKKMLVTKIKNTYPQISDDEIKAIKKLKYKDWGRLSATLLNSSAIAYEDKAFGELVTIISALRHTNKNFMELLSSYCSYDFIGKIKEFNGSRQSSNGKLTYKDVEELYVSPSVKRSIWQTLTILEEIKKIMGCEPKRIFIEMARSKEESKRTDSRLKKLQDLYKKCREENIDFMPRKDEFNTLKTQLSSKQEDDLRSDKLYLYYTQMGRCMYTGEKIELASLYDNNLYDIDHIYPRSKTKDDSLSNRVLVKKQVNAAKTDIYPLDAAIRTKMHSFWKLLYDKGFIDERKYQRLTRSTQLRDEELAGFISRQLVETRQSTKAVAAILKTAYQNSEVVYVKAGNVSDFRQQFKFVKCREVNDLHHAKDAYLNIVVGNCYHVKFTANPLNFITKNQDNRRYSLKPEIFYKFSIKRDGEIAWLGGEDGTMATVARTMHKNNILFTRQAVEGKGELFDQQPLKAKGGQLPLKAGLSIEKYGGYNSLTTAYFAVVKSEGKKGAVQLSIEAIPLVYAKQGEIAVQKYLTKVVQLCKPEIMLPKIKKYSLFKINGFPMHISGRTGNRMLFYGAGQLCLDEADVDYLKKALKYENDIAENELVIADKNSDDIQKQQAQKNLDYYNQKWRIGIKVNMHIYDMLLAKSGNNLYKNRPASQTTDLQEQREFFEKLSLANQIHVIGEVLKLFKCASASANLKLLDKGNACGVIKVSNNILKFKQCVLINQSPTGVFEQEVDLMKL

SEQ ID NO: 284 - protein, 1353 aa, synthetic construct
  REGION 1..1353: note = MG72-1 active effector
MKERSDYYLGFDIGTNSVGWAVTDENYRIQKFNGKLMWGSRLFDEANTAQERRMHRTLRRRLQRRRWRINLLQELFAEEISKVDMGFYQRLKDGALLPEDKSENQIYTLFHDADFNDTQFYEKYPTIYHLRKALITETDKKDIRLIYLALHHIMKHRGHFLFSGTVENATSFQCAYDNMVRCLEDEFDMTLSCDDRDELSKIIRDKRITKRDKASRILSLWHCEDEDRQKQWKAMIGMICGSKVKLAEVFADDTLKEADRPSISFADTSYDEIYPELEEILQERCGILDILKGVYDWGILADILKGGEYDGNSYLSIAKVGIYEKHKKDLRCLKSVLRDFANDTYRDFFQRPGKDNYCAYIGTTLRNGKKSSSKRCSYDDFKKATKKILEGIQAEDGDERIDYILEELEQGTFLPLQVSKENSVIPHQVHAMECRAILQNAEKHYDFLREKDEKGRTVSERIVQLFEFRIPYYVGPLNTSNKGNSWMIRKEGAEGRIDPWNFEEMVDTNASAEQFIRRMTNKCTYLRGEDVVPKYSLLYSEFMVWNELNNVKIRSEKLPTEMKTRIFDEVFQKNKKITGKTLLTYLQCEGIEVEASDLSGFDQTFKSSLTSYLDMKKIFGEEIQKFSCREMAEDLILWITLYGDAPKMLRQVIRNHYGEDRLSEEQLKKVCRLKYQGWGRLSKKFLNGIEGVSVETGETFTILRALRETNDNLMQILSSNYTFSKEIEAINKEKFQNIVSFSYDNIMKDTVASPAIKRAAWQVLLIAEEVRKIMGKEPLKIFVEMARGPEEKKATTSRQQRLLQLYAKIKDESREWKAELENRKESDFRSIKLYLYYTQMGKCMYSGKSLDLSQLANLEVCDRDHIYPQSKTKDDSLDNLVLVCSEYNRAKGDGMIKPEWQKKMTPFWQMLKNKGLISENKFRRLTRQTPLTDEELAGFINRQLVETRQSSKVVTELFQRLYENSQVVYVKAKAVSDFRHQTLEMVKCRSINDYHHAHDAYLNIVVGNVYHEKFTSNPLRWLREKKDYNYSLNRMFDWNLERRGRIIWEKGKKGTIQTVRHYMKQKDIRYTRYATENKSGQNGGLFDSQIVGKNENASIPIKKGMDVKKYGGYKTITPAYFALVQSVDKKGKLQKSVEAVPLYLKREVENNPERYLEYCRQEYGLKEPKILIPRIKKDSLFRINGFPMHLRGRQDTRLLLQGAVQLILDKDYEVYYKKIEKYLQRDQQNARERLSITERDEITSERNLWLYDELYRKQSETIYRYRPNSQCRILADGRERFLELSCEEQCAVLNEILHLLQCKSIMANLKMVGGSGLAGKILVNKVITKCNEAKLIHQSVTGLFEQEIDLLAL

SEQ ID NO: 285 - protein, 111 aa, synthetic construct
  REGION 1..111: note = MG72-2 effector
MKKYNIGLDIGTTSVGWAVVEDGTQKIMHKGKKALWGVRLFEEAQTAAERRGYRSTRRRYDRRRNRIKLLQEEFNSEINKVDPNFFIKLKESKYLEKDEKNKTIKLTKEEK

SEQ ID NO: 286 - protein, 58 aa, synthetic construct
  REGION 1..58: note = MG72-3 effector
MKKYNIGLDIGTNSVGWAVVESEKQKVLRKGNKKLWGVRLFDEALVWQFFIYNLDNPR

SEQ ID NO: 287 - protein, 1370 aa, synthetic construct
  REGION 1..1370: note = MG72-4 effector
MSKKFAGEYYLGLDIGTDSVGWAVTDNQYNVLKFNGKSMWGIRLFDAAQTAAERRMFRTARRRVERRRWRLELLQELFQNEIEKKDPDFFQRMKDSALYPEDSKTGKPFALFCDKDLNDKLYYKQYPTIYHLRKALLTENSKFDIRLVYLAIHHILKHRGHFLFNGDFSNVTRFSFAFEQLQTCLCNELDMDFECNNVQKLSEILKDTHMSKNDKVKASVALFENSGDKKQLQAVIGLFCGAKKKLADVFLDETLNDTEMPSISIADKPYEELRPELESILAEKCCVIDYIKAVYDWAILADMLDGGEYGNRTYISVARVRQYEKHHDDLKKLKKLVRRYCKSEYKSFFSFAGTDNYCAYIGDDIETDDRKSVKKCKQEDFYKRIKGLLKKAIENGCPKDEVVEIIKDIDAQVFLPLQVTKDNGVIPHQVHEMELKQILKNAEKYYPFLCKKDEEGIVTSNKILQLFKFRIPYYVGPLNSRIGKNSWIVRRAEGKIYPWNFEEKVDLDKSEEGFIRRMTNPCTYMAGADVLPKYSLLYSEFMVLNELNNVRICGDKLSVEIKQIIIKDLFQRTRRVTVRKLCDKLKAEGVISRNSNQKDIDIKGIDQDLKSSMVSYIDFKNIFGKEIEKYSVQQMCERIIFLLTIHHDDKRRLQKRIRAEFTETQITDDQLQKVLRLNYQGWGRFSAEFLKELKGVDTETGEVFSIINALRKTDDNLMQLLSNRYTFSEELEKYNSNKRKKIEALTYDNIMEGIVASPAIKRSAWQAISIVMELSKIMGREPKRIFVEMARGPEEKKHTISRKNQLLELYKSVKDESRDWKTELETKTESDFRSIKLFLYYTQMGRCMYTGEPIDLDQLANTTIYDRDHIYPQSLTKDDSLNNLVLVKKVENANKGNGLISADIQKKMRGFWAELKKKGLISDEKFSRLTRTTPLSDDELAGFINRQLVETRQSSKIVADLFHQLYPTTQVVYVKAKIVSDFRHETLDMVKVRSLNDLHHAKDAYLNIVTGNVYYEKFSGNPLTWLRKNPDRNYSLNQMFNYDIVKKTKEGTSYVWKKGKDGSIAVVRRTMERNDILYTRQATENKNGGLFDQNIVSSKNKPFIPVKKGLDVNKYGGYKGITPAYFALIEFTDKKGSRHRLIEAVPLYLRADIDNDSNVLRDFYKNVLGLENPVVILNRIKKNSLLKVNGFLIHLRGTTGFSASQLKVQNAVEFSLPHHMEDYVKKLENYEKHIIAERGSTKNSQIKITEWDGISKEKNLQLYDMFINKMENTIYKFRPANQVSNLKENREVFNSLAVEDQCSVLNQILMLFVCKPVTANLSLIKGSKNAGNMALSKIISNMRSAYLIHQSVTGLFEQKIDLLKVSSQKD

SEQ ID NO: 288 - protein, 1376 aa, synthetic construct
  REGION 1..1376: note = MG72-5 effector
MSKKFTGDYYLGLDIGTDSVGWAVTDDQYNVLKFNGKSMWGIRLFDAAQTAAERRGFRTARRRLERRRWRLDLLQELFQDEIDKKDPEFFQRMKDSALYPEDSKTGKPFALFRDKELNDKLYYKQYPTIYHLRKALLTEKEKFDIRLIYLAIHHILKHRGHFLFNGEFANVTKFSYAFEQLQDCLANELDLELECNDVQRLSVIIKDKHMGKNDKVNAAASLFPNVADKKQLKAIIGLACGAKKKLADIFCDETLNDSELSSISIAEKPYEELRPDLEAVLAEKCCVIDYIKSVYDWGILADMLEGGEWENHSYLSVARVRQYEKHHSDLKNLKQIIRKYCPADYKSFFSKDGTDNYCAYIGDDIETKERKSVKKCKQEDFYKRVKALLKKAVEKGCPEKTVAAISQDIDAQAFLPLQVTKDNGVIPHQVHEMELVQILKNAEKYYPFLQEKDSDGNITSDKILQLFKFRIPYYVGPLNSNVGKNSWIVRRAEGKIYPWNFEEKVDLDKSEEGFIRRMTNPCTYMLGADVLPKYSLLYSEFMVLNELNNVKVCGEKLPVELKQKIVKELFMKIRRVTVRKLCDKLKAEGFIPKNQNHKNVLIQSNDITGIDGDFKASLVSYIEMQKIFGKELEKYSVQQMCERIIFLLTIHHDDKKRLQNRIRSEYTKEQISDEQLQKVIRLSYQGWGRLSAEFLTGLNGADTETGEVFTIIKALRQTNDNLMQLLSGRYTFAEALEEHNNKKRKNISALTYDNIMENIIASPAIKRSAWQSISIAIELRKVMGREPKRIFIEVARGPEEKKRTVSRKNQLLELYKSIKDESRDWKKELENTAESDFRSVKLFLYYTQMGRCMYTGEPIELGQLVNTTVYDRNHITVYDRDHIYPQSLTKDDSLNNLVLVKRVENAKKGNGLISADIQKRMRGFWSILKESGLISNEKFNRLIRTTPLSDEELAGFINRQLVETRQSSKIVADLFQQIYPSTQVVYVKAKTVSDFRHETLDMVKVRSLNDLHHAKDAYLNIVVGNVYHEKFTGNPLTWLKKNQDRNYSLNQMFNSDQIRKTKDGNLYIWKKGNAGSIATVRKTMLRNDILYTRQATENKNGGLFDQNIVSSKNKPFIPVKKGMDVNKYGGYKGIKASNFALVEYSDNKGVRQRMIEAVPIYLNADMQNNSKVLNDFYANVLQMKSPKVILVGIKKNSLLKINGFLVHLRGTTGYAANQLSVQGAVEMSVPKEIEDYIKKLENYQNHKINEKNKLVNITKWDGITKEENLKLYELYIDKLKNTIYRFRPANQVDNLIKLKNNFLTLSVEEQCTVLTQIQLLFVCKPAMKADLSLIGGSKQAGNMALPKIISNAKSAYLIHQSVTGLFEQKIDLLTVK

SEQ ID NO: 289 - protein, 1370 aa, synthetic construct
  REGION 1..1370: note = MG72-6 effector
MSKKFAGEYYLGLDIGTDSVGWAVADNQYNVLKFNGKSMWGIRLFDAAQTAAERRVFRTARRRVERRRWRLELLQELFQNEIEKKDPDFFQRMKDSALYPEDSKTGKPFALFCDKDLNDKLYYKQYPTIYHLRKALLTEKSKFDIRLVYLAIHHILKHRGHFLFNGDFSNVTQFSFAFEQLQTCLCNELDMDFECNNVQKLSEILKDTHMSKNDKVKASVALFENSGDKKQLQAVIGLFCGAKKKLADVFLDETLNDTEMPSISIADKPYEELRPELESILAEKCCVIDYIKAVYDWAILADMLDGGEYGNRTYISVARVRQYEKHHDDLKKLKKLVRRYCKSEYKSFFSVAGTDNYCAYIGDDIETDDRKSVKKCKQEDFYKRIKGLLKKAIENGCPKDEVAEIIKDIDAQVFLPLQVTKDNGVIPYQVHEMELKQILKNAEKYYPFLCKKDEEGIVTSNKILQLFKFRIPYYVGPLNSRIGKNSWIVRRAEGKIYPWNFEEKVDLDKSEEGFIRRMTNPCTYMAGADVLPKYSLLYSEFMVLNELNNVRICGDKLSVEIKQTIIKDLFQRTRRVTVRKLCDKLKAEGVISRNSNQKDIDIKGIDQDLKSSMVSYIDFKNIFGKEIEKYSVQQMCERIIFLLTIHHDDKRRLQKRIRAEFTETQITDDQLQKVLRLNYQGWGRFSAEFLKELKGVDTETGEVFSIINALRKTDDNLMQLLSNRYTFSEELEKYNSNKRKKIEALTYDNIMEGIVASPAIKRSAWQAISIVMELSKIMGREPKRIFVEMARGPEEKKNTISRKNQLLELYKSVKDESRDWKTELETKTESDFRSIKLFLYYTQMGRCMYTGEPIDLDQLANTTIYDRDHIYPQSLTKDDSLNNLVLVKKVENANKGNGLISADIQKKMRGFWAELKKKGLISDEKFSRLTRTTPLSDDELAGFINRQLVETRQSSKIVADLFHQLYPTTQVVYVKAKIVSDFRHETLDMVKVRSLNDLHHAKDAYLNIVTGNVYYEKFSGNPLTWLRKNPDRNYSLNQMFNYDIVKKTKEGTSYVWKKGKDGSIAVVRRTMERNDILYTRQATENKNGGLFDQNIVSSKNKPFIPVKKGLDVNKYGGYKGITPAYFALIEFTDKKGSRQRLLEAVPLYLRADIDNDSNVLRDFYKNVLGLENPVVILNRIKKNSLLKINGFLIHLRGTTGFSASQLKVQNAVEFSLPHHMEDYVKKLENYEKHIIAERGSTKNSQIKITEWDGISKEKNLQLYDMFINKMENTIYKFRPANQVSNLKENREVFNSLAVEDQCSVLNQVLMLFVCKPVTANLSLIKGSKNAGNMALSKIISNMRSAYLIHQSVTGLFEQKIDLLKVSSQKD

SEQ ID NO: 290 - protein, 1370 aa, synthetic construct
  REGION 1..1370: note = MG72-7 effector
MSKKFAGEYYLGLDIGTDSVGWAVTDNQYNVLKFNGKSMWGIRLFDTAQTAAERRVFRTARRRVERRRWRLELLQELFQNEIEKKDPDFFQRMKDSALYPEDSKTGKPFALFCDKDLNDKLYYKQYPTIYHLRKALLTEKSKFDIRLVYLAIHHILKHRGHFLFNGDFSNVTRFSFAFEQLQTCLCNELDMDFECNNVQKLSEILKDTHMSKNDKVKASVALFENPGDKKQLQAVIGLFCGAKKKLADVFLDETLNDTEMPSISIADKPYEELRPELESILAEKCCVIDYIKAVYDWAILADMLDGGEYGNRTYISVARVRQYEKHHDDLKKLKKLVRRYCKSEYKSFFSVAGTDNYCAYIGDDIETDDRKSVKKCKQEDFYKRIKGLLKKAIENGCPKDEVAEIIKDIDAQVFLPLQVTKDNGVIPYQVHEMELKQILKNAEKYYPFLCKKDEEGIVTSNKILQLFKFRIPYYVGPLNSRIGKNSWIVRRAEGKIYPWNFEEKVDFDKSEEGFIRRMTNPCTYMAGADVLPKYSLLYSEFMVLNELNNVRICGDKLSVEIKQTIIKDLFQRTRRVTVRKLCDKLKAEGVISRNSNQKDIDIKGIDQDLKSSMVSYVDFKNIFGKEIEKYSVQQMCERIIFLLTIHHDDKRRLQKRIRAEFTEAQITDDQLQKVLRLNYQGWGRFSAEFLKELKGVDTETGEVFSIINALRETDDNLMQLLSNRYTFAEELEKYNSNKRKKIEALTYDNIMEGIVASPAIKRSAWQAISIVMELSKIMGREPKRIFVEMARGPEEKKHTISRKNQLLELYKSVKDESRDWKTELETKTESDFRSIKLFLYYTQMGRCMYTGEPIDLDQLANTTIYDRDHIYPQSLTKDDSLNNLVLVKKVENANKGNGLISADIQKKMRGFWAELKKKGLISDEKFSRLTRTTPLSDDELAGFINRQLVETRQSSKIVADLFHQLYPTTQVVYVKAKIVSDFRHETLDMVKVRSLNDLHHAKDAYLNIVTGNVYYEKFSGNPLTWLRKNPDRNYSLNQMFNYDIVKKTKEGTSYVWKRGKDGSIAVVRRTMERNDILYTRQATENKNGGLFDQNIVSSKNKPFIPVKKGLDVNKYGGYKGITPAYFALIEFTDKKGSRQRLLEAVPLYLRADIDNDSNVLRDFYKNVLGLENPVVILNRIKKNSLLKINGFLIHLRGTTGFSASQLKVQNAVEFSLPHHMEDYVKKLENYEKHIIAERGSTKNSQIKITEWDGISKEKNLQLYDMFINKMENTIYKFRPANQVSNLKENREVFNSLAVEDQCSVLNQVLMLFVCKPVTANLSLIKGSKNAGNMALSKIISNMRSAYLIHQSVTGLFEQKIDLLKVSSQKD

SEQ ID NO: 291 - protein, 1381 aa, synthetic construct
  REGION 1..1381: note = MG72-8 effector
MSIYKYYERMNIMAKKYGGDYYLGLDIGTDSVGWAVTDEQYNVLKFKGKSMWGIRLFDSAQTAAERRMFRTTRRRIERRRWRLELLQELFQDEINKKDPEFFLRMKESALYPEDSRTGKPFALFCDKDLNDKSYYKQYPTIYHLRKALLTENQKFDIRLLYLAIHHIMKHRGHFLFAGDFKNVTQFKFAFEQLQARLNDELDLTLECSDTQKLSEVLKDNHLGKNDKIKEAGALLQFSGDKKQLQAIVGLICGAKKKLSDVFMDEELSEAEVNSFSLDDKPYEELRPELEAVLADKCGVIDDIKGVHDWALLADMLDGGEWGKSTYLSVARVKQYDKHKQDLKTLKQMVRKYCPSEYKAFFSQAEKDNYCAYIGAGIETKNAKAVAKCKQEDFYKRVKTLIKQAGEKGCPVKITEGIVKDIEAQTFLPLQVTKDNSVIPHQVHEMELEQIVNKASQHYSFLKEKDTDGNQTANKIMQLFRFRIPYYVGPLNSYGKNSWIIRRAGGKIYPWNFEEKVDLDKSEEQFIQRMTNPCTYMLGASVLPKYSLLYSEFTALNELNNVRVCGEKLPVELKQRIFNDLFCKTRRVTLRKFCNQLKAEGFVPKSANGKNKIQPEDITGIDQDFKSSLVSYIEMHEIFGDELNKFTVQQMCERIIFLLSIHHDDKKRLQKRIREEYSNKQITDEQLEKVSRLSYQGWGKFSHEFLSELKGTDTETGEVFSIIEALRQTNDNLMQLLSGRYTFEKNRNEYNQNKRKQITSLTYDNIMGDVIASPAVKRSVWQAISITKELFKIMGRRPERIFVEMARGPEEKKRTVSRKNQLLELYKSIKDESRDWKKKLETKEEHEFRSIKLYLYYTQMGRCMYTGEAIRLEDLTNVNIYDRDHIYPQSLTKDDSLNNLVLVNKQENLKKSNGLVSETVQKKMRPFWTMLRDKGLISQEKFNRLIRTEPLSDEELAGFISRQLVETRQSTKIVAEKFEELYPQSEIVYVKAKTVSDFRQEILKMIKARSLNDLHHAKDAYLNVVVGNVYYEKFTKNPLTWLKNNKERKYSLNQMFNYDLTHKKGSDVTYIWKKGKDGSIATVNKIIERNDILYTRQATGNVNGGLFNQNIVSCLNQPSVPIKKGMDINKYGGYKGISPSSFALVEYTDKNGKRQRMIEAIPLYLNDVIIKDQNILSEFYKQVLGLKEPSIILTGIKKNSLLKINGFLVHLRGTTGYAANQLSVQNAVEMCISKDMEAYVKKLENYDNRKKETRNNSLRVTEWDGITREYNLALYDLCIDKFKNSIYKSRPANQGDNLEKFRNRFVKLTLEDQCTVLTQILLLFTCKPSMTADLSLIGGSKKAGNMALPKSLGNVDSAILINQSVTGLFEQKTNLLTVMTQI

SEQ ID NO: 292 - protein, 1371 aa, synthetic construct
  REGION 1..1371: note = MG72-9 effector
MSKKFAGEYYLGLDIGTDSVGWAVTDNQYNVLKFNGKSMWGIRLFDTAQTAAERRVFRTARRRVERRRWRLELLQELFQNEIEKKDPDFFQRMKDSALYPEDSKTGKPFALFCDKDLNDKLYYKQYPTIYHLRKALLTENSKFDIRLVYLAIHHILKHRGHFLFNGDFSNVTRFSFAFEQLQTCLCNELDMDFECNNVQKLSEILKDTHMSKNDKVKASVALFENSGDKKQLQAVIGLFCGAKKKLADVFLDETLNDTEMPSISIADKPYEELRPELESILAEKCCVIDYIKAVYDWAILADMLDGGEYGNRTYISVARVRQYEKHHDDLKKLKKLVRLYCKSEYKSFFSVAGTDNYCAYIGDDIETDDRKSVKKCKQEDFYKRIKGLLKKAIENGCPKDEVVEIIKDIDAQVFLPLQVTKDNGVIPHQVHEMELKQILKNAEKYYPFLCKKDEEGIVTSNKILQLFKFRIPYYVGPLNSRIGKNSWIVRRAEGKIYPWNFEEKVDLDKSEEGFIRRMTNPCTYMAGADVLPKYSLLYSEFMVLNELNNVRICGDKLSVEIKQTIIKDLFQRTRRVTVRKLCDKLKAEGVISRNSNQKDIDIKGIDQDLKSSMVSYIDFKNIFGKEIEKYSVQQMCERIIFLLTIHHDDKRRLQKRIRAEFTETQITDDQLQKVLRLNYQGWGRFSAEFLKELKGVDTETGEVFSIINALRKTDDNLMQLLSNRYTFSEELEKYNSNKRKKIEALTYDNIMEGIVASPAIKRSAWQAISIVMELSKIMGREPKRIFVEMARGPEEKKHTISRKNQLLELYKSVKDESRDWKTELETKTESDFRSIKLFLYYTQMGRCMYTGEPIDLDQLANTTTIYDRDHIYPQSLTKDDSLNNLVLVKKVENVNKGNGLISADIQKKMRGFWAELKKKGLISDEKFSRLTRTTPLSDDELAGFINRQLVETRQSSKIVADLFHQLYPTTQVVYVKAKIVSDFRHETLDMVKVRSLNDLHHAKDAYLNIVTGNVYYEKFSGNPLTWLRKNPDRNYSLNQMFNYDIVKKTKEGTSYVWKKGKDGSIAVVRRTMERNDILYTRQATENKNGGLFDQNIVSSKNKPFIPVKKGLDVNKYGGYKGITPAYFALIEFTDKKGSRQRLLEAVPLYLRADIDNDSNVLRDFYKNVLGLENPVVILNRIKKNSLLKINGFLIHLRGTTGFSASQLKVQNAVEFSLPHHMEDYVKKLENYEKHIIAERGSKKISQIKITEWDGISKEKNLQLYDMFINKMENTIYKFRPANQVANLKENREVFNLLAVEDQCSVLNQILMLFVCKPVTANLSLIKGSKNAGNMALSKIISNMRSAYLIHQSVTGLFEQKIDLLKVSSQKD

SEQ ID NO: 293 - protein, 1370 aa, synthetic construct
  REGION 1..1370: note = MG72-10 effector
MSKKFAGEYYLGLDIGTDSVGWAVTDNQYNVLKFNGKSMWGIRLFDAAQTAAERRMFRTARRRVERRRWRLELLQELFQNEIEKKDPDFFQRMKDSALYPEDSKTGKPFALFCDKDLNDKLYYKQYPTIYHLRKALLTENSKFDIRLVYLAIHHILKHRGHFLFNGDFSNVTRFSFAFEQLQTCLCNELDMDFECNNVQKLSEILKDTHMSKNDKVKASVALFENSGDKKQLQAVIGLFCGAKKKLADVFLDETLNDTEMPSISIADKPYEELRPELESILAEKCCVIDYIKAVYDWAILADMLDGGEYGNRTYISVARVRQYEKHHDDLKKLKKLVRLYCKSEYKSFFSVAGTDNYCAYIGDDIETDDRKSVKKCKQEDFYKRIKGLLKKAIENGCPKDEVVEIIKDIDAQVFLPLQVTKDNGVIPHQVHEMELKQILKNAEKYYPFLCKKDEEGIVTSNKILQLFKFRIPYYVGPLNSRIGKNSWIVRRAEGKIYPWNFEEKVDLDKSEEGFIRRMTNPCTYMAGADVLPKYSLLYSEFMVLNELNNVRICGDKLSVEIKQTIIKDLFQRTRRVTVRKLCDKLKAEGVISRNSNQKDIDIKGIDQDLKSSMVSYIDFKNIFGKEIEKYSVQQMCERIIFLLTIHHDDKRRLQKRIRAEFTEAQITDDQLQKVLRLNYQGWGRFSAEFLKELKGVDTETGEVFSIINALRETDDNLMQLLSNRYTFAEELEKYNSNKRKKIEALTYDNIMEGIVASPAIKRSAWQAISIVMELSKIMGREPKRIFVEMARGPEEKKHTISRKNQLLELYKSVKDESRDWKTELETKTESDFRSIKLFLYYTQMGRCMYTGEPIDLDQLANTTIYDRDHIYPQSLTKDDSLNNLVLVKKVENANKGNGLISADIQKKMRGFWAELKKKGLISDEKFSRLTRTTPLSDDELAGFINRQLVETRQSSKIVADLFHQLYPTTQVVYVKAKIVSDFRHETLDMVKVRSLNDLHHAKDAYLNIVTGNVYYEKFSGNPLTWLRKNPDRNYSLNQMFNYDIVKKTKEGTSYVWKKGKDGSIAVVRRTMERNDILYTRQATENKNGGLFDQNIVSSKNKPFIPVKKGLDVNKYGGYKGITPAYFALIEFTDKKGSRQRLLEAVPLYLRADIDNDSNVLRDFYKNVLGLENPVVILNRIKKNSLLKINGFLIHLRGTTGFSASQLKVQNAVEFSLPHHMEDYVKKLENYEKHIIAERGSTKNSQIKITEWDGISKEKNLQLYDMFINKMENTIYKFRPANQVSNLKENREIFNSLAVEDQCSVLNQVLMLFVCKPVTANLSLIKGSKNAGNMALSKIISNMRSAYLIHQSVTGLFEQKIDLLKVSSQKD

SEQ ID NO: 294 - protein, 1370 aa, synthetic construct
  REGION 1..1370: note = MG72-11 effector
MSKKFAGEYYLGLDIGTDSVGWAVTDNQYNVLKFNGKSMWGIRLFDAAQTAAERRMFRTARRRVERRRWRLELLQELFQNEIEKKDPDFFQRMKDSALYPEDSKTGKPFALFCDKDLNDKLYYKQYPTIYHLRKALLTENSKFDIRLVYLAIHHILKHRGHFLFNGDFSNVTRFSFAFEQLQTCLCNELDMDFECNNVQKLSEILKDTHMSKNDKVKASVALFENSGDKKQLQAVIGLFCGAKKKLADVFLDETLNDTEMPSISIADKPYEELRPELESILAEKCCVIDYIKAVYDWAILADMLDGGEYGNRTYISVARVRQYEKHHDDLKKLKKLVRLYCKSEYKSFFSVAGTDNYCAYIGDDIETDDRKSVKKCKQEDFYKRIKGLLKKAIENGCPKDEVVEIIKDIDAQVFLPLQVTKDNGVIPHQVHEMELKQILKNAEKYYPFLCKKDEEGIVTSNKILQLFKFRIPYYVGPLNSRIGKNSWIVRRAEGKIYPWNFEEKVDFDKSEEGFIRRMTNPCTYMAGADVLPKYSLLYSEFMVLNELNNVRICGDKLSVEIKQTIIKDLFQRTRRVTVRKLCDKLKAEGVISRNSNQKDIDIKGIDQDLKSSMVSYVDFKNIFGKEIEKYSVQQMCERIIFLLTIHHDDKRRLQKRIRAEFTEAQITDDQLQKVLRLNYQGWGRFSAEFLKELKGVDTETGEVFSIINALRETDDNLMQLLSNRYTFAEELEKYNSNKRKKIEALTYDNIMEGIVASPAIKRSAWQAISIVMELSKIMGREPKRIFVEMARGPEEKKHTISRKNQLLELYKSVKDESRDWKTELETKTESDFRSIKLFLYYTQMGRCMYTGEPIDLDQLANTTIYDRDHIYPQSLTKDDSLNNLVLVKKVENVNKGNGLISADIQKKMRGFWAELKKKGLISDEKFSRLTRTTPLSDDELAGFINRQLVETRQSSKIVADLFHQLYPTTQVVYVKAKIVSDFRHETLDMVKVRSLNDLHHAKDAYLNIVTGNVYYEKFSGNPLTWLRKNPDRNYSLNQMFNYDIVKKTKEGTSYVWKKGKDGSIAVVRRTMERNDILYTRQATENKNGGLFDQNIVSSKNKPFIPVKKGLDVNKYGGYKGITPAYFALIEFTDKKGSRQRLLEAVPLYLRADIDNDSNVLRDFYKNVLGLENPVVILNRIKKNSLLKINGFLIHLRGTTGFSASQLKVQNAVEFSLPHHMEDYVKKLENYEKHIIAERGSTKNSQIKITEWDGISKEKNLQLYDMFINKMENTIYKFRPANQVSNLKENREVFNSLAVEDQCSVLNQVLMLFVCKPVTANLSLIKGSKNAGNMALSKIISNMRSAYLIHQSVTGLFEQKIDLLKVSSQKD

SEQ ID NO: 295 - protein, 1370 aa, synthetic construct
  REGION 1..1370: note = MG72-12 effector
MSKKFAGEYYLGLDIGTDSVGWAVTDNQYNVLKFNGKSMWGIRLFDAAQTAAERRMFRTARRRVERRRWRLELLQELFQNEIEKKDPDFFQRMKDSALYPEDSKTGKPFALFCDKDLNDKLYYKQYPTIYHLRKALLTENSKFDIRLVYLAIHHILKHRGHFLFNGDFSNVTRFSFAFEQLQTCLCNELDMDFECNNVQKLSEILKDTHMSKNDKVKASVALFENSGDKKQLQAVIGLFCGAKKKLADVFLDETLNDTEMPSISIADKPYEELRPELESILAEKCCVIDYIKAVYDWAILADMLDGGEYGNRTYISVARVRQYEKHHDDLKKLKKLVRLYCKSEYKSFFSVAGTDNYCAYIGDDIETDDRKSVKKCKQEDFYKRIKGLLKKAIENGCPKDEVVEIIKDIDAQVFLPLQVTKDNGVIPHQVHEMELKQILKNAEKYYPFLCKKDEEGIVTSNKILQLFKFRIPYYVGPLNSRIGKNSWIIRRAEGKIYPWNFEEKVDLDKSEEGFIRRMTNPCTYMAGADVLPKYSLLYSEFMVLNELNNVRICGDKLSVEIKQIIIKDLFQRTRRVTVRKLCDKLKAEGVISRNSNQKDIDIKGIDQDLKSSMVSYVDFKNIFGKEIEKYSVQQMCERIIFLLTIHHDDKRRLQKRIRAEFTEAQITDDQLQKVLRLNYQGWGRFSAEFLKELKGVDTETGEVFSIINALRETDDNLMQLLSNRYTFAEELEKYNSNKRKKIEALTYDNIMEGIVASPAIKRSAWQAISIVMELSKIMGREPKRIFVEMARGPEEKKHTISRKNQLLELYKSVKDESRDWKTELETKTESDFRSIKLFLYYTQMGRCMYTGEPIDLDQLANTTIYDRDHIYPQSLTKDDSLNNLVLVKKVENANKGNGLISADIQKKMRGFWAELKKKGLISDEKFSRLTRTTPLSDDELAGFINRQLVETRQSSKIVADLFHQLYPTTQVVYVKAKIVSDFRHETLDMVKVRSLNDLHHAKDAYLNIVTGNVYYEKFSGNPLTWLRKNPDRNYSLNQMFNYDIVKKTKEGTSYVWKKGKDGSIAVVRRTMERNDILYTRQATENKNGGLFDQNIVSSKNKPFIPVKKGLDVNKYGGYKGITPAYFALIEFTDKKGSRQRLLEAVPLYLRADIDNDSNVLRDFYKNVLGLENPVVILNRIKKNSLLKINGFLIHLRGTTGFSASQLKVQNAVEFSLPHHMEDYVKKLENYEKHIIAERGSTKNSQIKITEWDGISKEKNLQLYDMFINKMENTIYKFRPANQVSNLKENREVFNSLAVEDQCSVLNQVLMLFVCKPVTANLSLIKGSKNAGNMALSKIISNMRSAYLIHQSVTGLFEQKIDLLKVSSQKD

SEQ ID NO: 296 - protein, 1027 aa, synthetic construct
  REGION 1..1027: note = MG73-1 active effector
MTKILGLDLGIASVGYAVVNLDEQKFDGGEILTAGVRIFEAAENPKDGASLSAPRREARALRRILRRKTIRLQQIRNLFIKYQILTTEELNHLYASPLPSVWEIRTLSLYEKQPLQHIARALLHIAKRRGFRSMRKSAEEKNYETGQLLQGISLLQNLLKQSGRQTIGEFLYHLPQSEPKRNKAGSYNHSIARSMLEEEVRLILEKQRTYGNTALSSEFEQEFRAIAFDQQPLKPSSPGKCTFLPDEDRAPKQAYTAELFAALSKINHIRIVSQGTSRALSADERQIALDLCLEKENNNFAQLRKLLELQENEFFNISYIIPRAKQNTDYQPEKKTAVYKMTGYHALRKALKDHKPLWTTYMDNPNGGLDQIAVVLATFKSDKEIINALEKLQFPSELIEAVKSLSFSGFMHLSLKAMRNINPFLLEGHTYDKACELAGYNFQAAKRNAGLTKLPPLTEEENFSITSPVVKRSIAQTRKVVNALNRKYGPFDAVHIELAREMGRNWAQRKELTQQQKENQEERDLIKAQGIEGLFPKNSLDIKKIRLWKEQGGYCIYSNQYIKPEQILEEGYCQVDHIIPYSRSFDNTLSNQVLCLTKENQDKRNDIPFDYFQRIQRDWDSFVTLVNASPTMRPNKKQKLLRTELSEEDLAGFKDRNLNDTRFISSFVRKYLLQNLQLTNKYKQGVFCRNGKITADLRNMWGLSKIREQDDKHHALDAIVLACCSNAMMQQISTQYTHNKETAALKIKPLFPWPWKEFRTDVENALLSIFVSRPPRKKITGAFHKETYYSAKHLARGFKTLKTDINTLTAEKLAKQRDLEIKYYGVERNKKLYDAIEQALLARTDAKQPLKVYLGPAQTPVKKIKLIMEGNKGVPVLKGTAVAENGAMPRVDVFYKNGTYFLVPVYTIDFTKEKLPLISIPDNQPMDVRDFRFSLYKDDYVQIKNKTGETFEGYFKQYNAQTGQIYLETHDRSDSYTVSGKPASEKKFSKSTFVDFTKYQIDILGNQHRVEKEKYTGITRKNKGFGG

SEQ ID NO: 297 - protein, 1058 aa, synthetic construct
  REGION 1..1058: note = MG73-2 active effector
MNKILGIDMGIASLGYAVVNIDDENFVNGDILASGVRIFDVAESPDGSSLAAPRRAARSVRRILRRKVMRIKAIKQLFLDFNLLSPQELDLLSKQDFKTLYQATPEGQPIPSVWEIRARALDNPCSLVDICRALLHIAKRRGFRSMRKSEKLTGEAGKLLKGVEEMQKKLQESNFRTIGELLFHLPATEPKRNKDGSYSHSVARSLLEEEVHLILQVQRAKGANALSQEFETQFCKIAFLQNPLQPSDPGFCTLEPTEPRAPKNAYTAELFAALCKINHIYLEEDGQSHALSAAQRALALEKCFSTQKTNYKQLRELFNLPNDIKFNISYTAPAKKKSKKKEEAQSPEQAVQAPQEYDAEKNTTLYNMAGFHALKKALKSSPLWAEYQTNPNGILDKIAEVLSRYKSDGEIRQHLTALGLPAEAVEKLQNVNFSGFMNLSLVAMNKIIPFLKEGFRYDVACKKAGYNFQAPQQNKGLSKLPPLTEEDNHTITSPVAKRSLAQARKVINALNKKYGPFDAVHIEVAREIGKSFEKRKEIEAEQKAHAEERARLKEVGIDGIIPQTETDLKKLRLWKEQDGRCMYSLQYIEPRKILEEGYCQVDHIIPYSLSFDNSLNNQVLCLTSENQHKKNQIPYEYFHSGKAQITWEDFEGYVNSLQNIRMAKKHRLLKQELTEDDLQGFKERNLSDTKLISRFMKNYLLANLRLTGKYKQGVFCVNGKHTSTLRGFWRLQKIREDGDKHHALDAIVIACCTNRLMQYISTKYRQNRELELQRKEVAVPWPFPHFKHAVENSLLSIFVSRPPRKKVTGALHKNTFFSAKHIKKGIKTLRTDIQKLTLDSLKKQRELEVKYFGVERNKPLYDLIETALNNRPNDKTPIQVQMPTKNGGFVPVRHIKLISESTSGIPVLGGTALAENDSMPRVDVFLEDGQYYVVPVYTMDFAKGVLPLVAQPSGRLMKKENFVFSLYKDDYVNLVNKQGETWEGYFKQLNAQTGQIYLESHDRSAQYTVSGKPSNQKKIASSTLKLIEKYQIDIFGGKHLVKKEKYIGIIRKNKGFGG

SEQ ID NO: 298 - protein, 1058 aa, synthetic construct
  REGION 1..1058: note = MG73-3 effector
MNKILGIDMGIASLGYAVVNIDDENFVNGDILASGVRIFDVAESPDGSSLAAPRRAARSVRRILRRKVMRIKAIKQLFLDFNLLSPQELDLLSKQDFKTLYQATPEGQPIPSVWEIRARALDNPCSLVDICRALLHIAKRRGFRSMRKSEKLTGEAGKLLKGVEEMQKKLQESHFRTIGELLFHLPATEPKRNKDGSYSHSVARSLLEEEVHLILQVQRAKGANALSQEFETQFCKIAFLQNPLQPSDPGFCTLEPTEPRAPKNAYTAELFAALCKINHIYLEEDGQSHALSATQRALALKKCFSTQKTNYKQLRELFNLPNDIKFNISYTAPAKKKSKKKEEAQSPEQAMQAPQEYDAEKNTTLYNMAGFHALKKALKSSPLWAEYQTNPNGILDKIAEVLSRYKSDGEIRQYLTALGLPAEAVEKLQNVNFSGFMNLSLVAMNKIIPFLKEGFRYDVACKKAGYNFQAPQQNKGLSKLPPLTEEDNHTITSPVAKRSLAQARKVINALNKKYGPFDAVHIEVAREIGKSFEKRKEIEAEQKAHAAERAQLKEVGIDGIIPQTETDLKKLRLWKEQDGRCMYSHQYIEPEKILEEGYCQVDHIIPYSLSFDNSLNNQVLCLTSENQHKKNQIPYEYFHSGKAQITWEDFEGYVNSLQNMRMAKKHRLLKQELTEDDLQGFKERNLSDTKLISRFMKNYLLANLRLTGKYKQGVFCVNGKHTSTLRGFWSLQKIREDGDKHHALDAIVIACCTNRLMQYISTKYRQNRELELQRKEVAVPWPFPHFKHAVENSLLSIFVSRPPRKKVTGALHKNTFFSAKHIKKGIKTLRTDIQKLTLDSLKEQRELEVKYFGVERNKPLYDLIETALNNRPNDKTPIQVQMPTKNGGFVPVRHIKLISESTSGIPVLGGTALAENDSMPRVDVFLEDGQYYVVPVYTMDFAKGVLPLVAQPSGRLMKKENFVFSLYKDDYVNLVNKQGETWEGYFKQLNAQTGQIYLESHDRSAQYTVSGKPSNQKKIASSTLKLIEKYQIDIFGGKHLVKKEKYIGIIRKNKGFGG

SEQ ID NO: 299 - protein, 1058 aa, synthetic construct
  REGION 1..1058: note = MG73-4 effector
MNKILGIDMGIASLGYAVVNIDDENFVNGDILASGVRIFDVAESPDGSSLAAPRRAARSVRRILRRKVMRIKAIKQLFLDFNLLSPQELDLLSKQDFKTLYQATPKSQPIPSVWEIRARALDNPCSMVDICRALLHIAKRRGFRSMRKSEKLTGEAGKLLKGVEEMQKKLQESHFRTIGELLFHLPATEPKRNKDGSYSHSVARTLLEEEVHLILQAQREKGARALSQEFETQFCKIAFLQNPLQPSDPGFCTLEPTEPRAPKNAYTAELFAALCKINHIYLEEDGQSHALSATQRALALKKCFSTQKTNYKQLRELFNLPNDIKFNISYTAPAKKKSKKKEEAQSPEQAVQAPQEYDAEKNTTLYNMAGFHALKKALKSSPLWAEYQTNPNGILDKIAEVLSRYKSDGEIRQHLTALGLPAEAVEKLQNVNFSGFMNLSLVAMNKIIPFLKEGFRYDVACKKAGYNFQAPQQNKGLSKLPPLTEEDNHTITSPVAKRSLAQARKVINALNKKYGPFDAVHIEVAREIGKSFEKRKEIEAEQKAHAEERARLKEVGIDGIIPQTETDLKKLRLWKEQDGRCMYSLQYIEPRKILEEGYCQVDHIIPYSLSFDNSLNNQVLCLTSENQHKKNQIPYEYFHSGKAQITWEDFEGYVNSLQNIRMAKKHRLLKQELTEDDLQGFKERNLSDTKLISRFMKNYLLANLRLTGKYKQGVFCVNGKHTSTLRGFWRLQKIREDGDKHHALDAIVIACCTNRLMQYISTKYRQNRELELQRKEVAVPWPFPHFKHAVENSLLSIFVSRPPRKKVTGALHKNTFFSAKHIKKGIKTMRTDIQKLTLDSLKKQRELEVKYFGVERNKPLYDLIETALNNRPNDKTPIQVQMPTKNGGFVPVRHIKLISESTSGIPVLGGTALAENDSMPRVDVFLEDGQYYVVPVYTMDFAKGVLPLVAQPSGRLMKKENFVFSLYKDDYVNLVNKQGETWEGYFKQLNAQTGQIYLESHDRSAQYTVSGKPSNQKKIASSTLKLIEKYQIDIFGGKHLVKKEKYIGIIRKNKGFGG

SEQ ID NO: 300 - protein, 1059 aa, synthetic construct
  REGION 1..1059: note = MG73-5 effector
MNKILGIDMGIASLGYAVVNIDDENFVNGDILASGVRIFDVAESPDGSSLAAPRRAARSVRRILRRKVMRIKAIKQLFLDFNLLSPQELDLLSKQDFKTLYQATREGQPIPSVWEIRARALDNPCSMVDICRALLHIAKRRGFRSMRKSEKLTGEAGKLLKGVEEMQKKLQESHFRTIGELLFHLPATEPKRNKDGSYSHSVARSLLEEEVHFILQAQRAKGAIALSQEFETQFCKIAFLQNPLQPSDPGFCTLEPTEQRAPKNAYTAELFAALCKINHIYLEEDGQSHALSAAQRALALEKCFSTQKTNYKQLRELFNLPNDIKFNISYTAPAKKKSKKKEEAQSPEQAVQAPQEYDAEKNTTLYNMTGFHALKKALKSSPLWAEYQNNPNGILDKIAEVLSRYKSDGEIRQHLTALGLPAETVEKLQNVNFSGFMNLSLVAMNKIIPFLKEGFRYDVACKKAGYNFQAPQQNKGLSKLPPLTQEDNHTITSPVAKRSLAQARKVINALNKKYGPFDAVHIEVAREIGKSFEKRKEIEAEQKAHAAERAQLKEVGIDGIIPQTETDLKKLRLWKEQDGRCMYSLQYIEPEKILEEGYCQVDHIIPYSLSFDNSLNNQVLCLTSENQHKKNQIPYEYFHRGKAQITWEKFEGYVVNSLQNMRMAKKHRLLKQELTEDDLQGFKERNLSDTKLISRFMKNYLLANLRLTGKYKQGVFCVNGKHTSTLRGFWRLQKIREDGDKHHALDAIVIACCTNRLMQYISTKYRQNRELELQRKEVAVPWPFPHFKHAVENSLLSIFVSRPPRKKVTGALHKNTFFSAKHIKKGIKTLRTDIQKLTLDSLKKQRELEVKHFGVERNKPLYDLIETALNNRPDDKMPIQVQMPTKNGGFVPVRHIKLISESTSGIPVLGGTALAENDSMPRVDVFLEDGQYYVVPVYTMDFAKGVLPLVAQPSGRLMKKENFVFSLYKDDYVNLVNKQGETWEGYFKQLNAQTGQIYLESHDRSAQYTVSGKPSNQKKIASSTLKLIEKYQIDIFGGKHLVKKEKYIGIIRKNKGFGG

SEQ ID NO: 301 - protein, 1058 aa, synthetic construct
  REGION 1..1058: note = MG73-6 effector
MNKILGIDMGIASLGYAVVNIDDENFVNGDILASGVRIFDVAENPDNGSSLAAPRRAARSVRRILRRKVMRIKAIKQLFLDFNLLSPQELDLLSKQDFKTLYQATPEGQPIPSVWEIRARALDNPCSLVDICRALLHIAKRRGFRSMRKSEKLTGEAGKLLKGVEEMQKRLQESHFRTIGELLFHLPATEPKRNKDGSYSHSVARSLLEEEVHLILQAQREKGVNALSQEFETQFCKIAFLQNPLQPSDPGFCTLEPTEPRAPKNAYTAELFAALCKINHIYLEEDGQSHALSAAQRALALEKCFSTQKTNYKQLRELFNLPNNIKFNISYTAPAKKKSKKEETQSPEQAAQAPKEYDAEKNTTLYNMTGFHALKKALKSSPLWAEYQTNPNGILDKIAEVLSRYKSDGEIRQHLTALGLPAEAVEKLQNVNFSGFMNLSLVAMNKIIPFLKEGFRYDVACKKAGYNFQATQQNKGLSKLPPLTEEDNHTITSPVAKRSLAQARKVINALNKKYGPFDAVHIEVAREMGKSFEKRKEMEAKQKANAEERAQLKEVGIDGIIPQTETDLKKLRLWKEQDGLCMYSLQYIEPQKILEEGYCQVDHIIPYSLSFDNSLNNQVLCLTSENQHKKNQIPYEYFHSGKAQITWKDFEGYVNSLQNMRMAKKHRLLKQELTEDELQGFKERNLSDTKLISRFMKNYLLANLRLTGKYKQGVFCVNGKHTSTLRGFWRLQKIREDGDKHHALDAIVIACCTNRLMQYISTKYRQNREIELKRKEVAVPWPFPQFNQAVENSLLSIFVSRPPRKKVTGALHKNTFFSAKHIKKGIKTLRTDIQKLTLDSLKKQRELEVKHFGVERNKPLYDLIETALNNRPDDKTPIQVQMPTKNGGFVPVRHIKLISESTSGIPVLGGTARAENDSMPRVDVFLEDGQYYVVPVYTMDFAKGVLPLVAQPSGRLMKKENFVFSLYKDDYVNLVNKQGETWEGYFKQYDATTSQIHLESHDRSAQYTVSGQLTNKKKIASSTLKLIEKYQIDIFGGKHLVKKEKYIGIIRKNKGFGG

SEQ ID NO: 302 - protein, 1058 aa, synthetic construct
  REGION 1..1058: note = MG73-7 effector
MNKILGIDMGIASLGYAVVNIDDENFVNGDILASGVRIFDVAESPDGSSLAAPRRAARSVRRILRRKVMRIKAIKQLFLDFNLLSPQELDLLSKQDFKTLYQATPEGQPIPSVWEIRARALDNPCSLVDICRALLHIAKRRGFRSMRKSEKLTGEAGKLLKGVEEMQKKLQESHFRTIGELLFHLPATEPKRNKDGSYSHSVARSLLEEEVHLILQVQRAKGANALSQEFETQFCKIAFLQNPLQPSDPGFCTLEPTEPRAPKNAYTAELFAALCKINHIYLEEDGQSHALSATQRALALKKCFSTQKTNYKQLRELFNLPNDIKFNISYTAPAKKKSKKKEEAQSPEQAMQAPQEYDAEKNTTLYNMAGFHALKKALKSSPLWAEYQTNPNGILDKIAEVLSRYKSDGEIRQYLTALGLPAEAVEKLQNVNFSGFMNLSLVAMNKIIPFLKEGFRYDVACKKAGYNFQAPQQNKGLSKLPPLTQEDNHTITSPVAKRSLAQARKVINALNKKYGPFDAVHIEVAREIGKSFEKRKEIEAEQKAHAAERAQLKEVGIDGIIPQTETDLKKLRLWKEQDGRCMYSHQYIEPEKILEEGYCQVDHIIPYSLSFDNSLNNQVLCLTSENQHKKNQIPYEYFHSGKAQITWEDFEGYVNSLQNMRMAKKHRLLKQELTEDDLQGFKERNLSDTKLISRFMKNYLLANLRLTGKYKQGVFCVNGKHTSTLRGFWSLQKIREDGDKHHALDAIVIACCTNRLMQYISTKYRQNRELELQRKEVAVPWPFPHFKHAVENSLLSIFVSRPPRKKVTGALHKNTFFSAKHIKKGIKTLRTDIQKLTLDSLKEQRELEVKYFGVERNKPLYDLIETALNNRPNDKTPIQVQMPTKNGGFVPVRHIKLISESTSGIPVLGGTALAENDSMPRVDVFLEDGQYYVVPVYTMDFAKGVLPLVAQPSGRLMKKENFVFSLYKDDYVNLVNKQGETWEGYFKQLNAQTGQIYLESHDRSAQYTVSGKPSNQKKIASSTLKLIEKYQIDIFGGKHLVKKEKYIGIIRKNKGFGG

SEQ ID NO: 303 - protein, 1058 aa, synthetic construct
  REGION 1..1058: note = MG73-8 effector
MNKILGIDMGIASLGYAVVNIDDENFVNGDILASGVRIFDVAESPDGSSLAAPRRAARSVRRILRRKVMRIKAIKQLFLDFNLLSPQELDLLSKQDFKTLYQATPEGQPIPSVWEIRARALDNPCSMVDICRALLHIAKRRGFRSMRKSEKLTGEAGKLLKGVEEMQKKLQESHFRTIGELLFHLPTTEPKRNKDGSYSHSVARSLLEEEVHLILQVQRAKGVNALSQEFETQFCKIAFLQNPLQPSDPGFCTLEPTEPRAPKNAYTAELFAALCKINHIYLEEDGQSHALSATQRDLALEKCFSTQKTNYKQLRELFNLPNDIKFNISYTAPAKKKSKKKEEAQSPEQAVQAPQEYDAEKNTTLYNMEGFHALKKALKSSPLWAEYQTNPNGILDKIAEVLSRYKSDGEIRQYLTALGLPAEAVEKLQNVNFSGFMNLSLVAMNKIIPFLKEGFRYDVACKKAGYNFQAPQQNKGLSKLPPLTQEDNHTITSPVAKRSLAQARKVINALNKKYGPFDAVHIEVAREIGKSFEKRKEIEAEQKAHAEERAQLKEVGIDGIIPQTETDLKKLRLWKEQDGRCMYSLQYIEPQKILEEGYCQVDHIIPYSLSFDNSLNNQVLCLTSENQHKKNQIPYEYFHSGKAQITWEDFEGYVNSLQNMRMAKKHRLLKQELTEDDLQGFKERNLSDTKLISRFMKNYLLANLRLTGKYKQGVFCVNGKHTSTLRGFWRLQKIREDGDKHHALDAIVIACCTNRLMQYISTKYRQNRELELQRKEVAVPWPFPHFKHAVENSLLSIFVSRPPRKKVTGALHKSTFFSAKHIKKGIKTLRTDIQKLTLDSLKKQRELEVKYFGVERNKPLYDLIETALNNRPNDKTPIQVQMPTKNGGFVPVRHIKLISESTSGIPVLGGTALAENDSMPRVDVFLEDGQYYVVPVYTMDFAKGVLPLVAQPSGRLMKKENFVFSLYKDDYVNLVNKQGEIWEGYFKQLNAQTGQIYLESHDRSAQYTVSGKPSNQKKIASSTLKLIEKYQIDIFGGKHLVKKEKYIGIIRKNKGFGG

SEQ ID NO: 304 - protein, 1059 aa, synthetic construct
  REGION 1..1059: note = MG73-9 effector
MNKILGIDMGIASLGYAVVNIDDENFVNGDILASGVRIFDVAESPDGNSLAAPRRAARSVRRILRRKVMRIKAIKQLFLDFNLLSPQELDLLSKQDFKTLYQATPEGQPIPSVWEIRARALDNPCSLVDICRALLHIAKRRGFRSMRKSEKLTGEAGKLLKGVEEMQKKLQESHFRTIGELLFHLPATEPKRNKDGSYSHSVARSLLEEEVHLILQAQRAKGVNALSQEFETQFCKIAFLQNPLQPSDPGFCTLEPTEPRAPKNAYTAELFAALCKINHIYLEEDGQSHALSATQRDLALEKCFSTQKTNYKQLRELFNLPNDIKFNISYTAPAKKKSKKKEETQSPEQAVQAPQEYDAEKNTTLYNMAGFHALKKALKSSPLWAEYQNNPNRILDKIAEVLSRYKSDGEIRQYLTALGLPAEAVEKLQNVNFSGFMNLSLVAMNKIIPFLKEGFRYDVACKKAGYNFQAPQQNKGLSKLPPLTQEDNHTITSPVAKRSLAQARKVINALNKKYGPFDAVHIEVAREIGKSFEQRKEIEAEQKAHAAERAQLKEVGIDGIIPQTETDLKKLRLWKEQDGRCMYSLQYIEPQKILEEGYCQVDHIIPYSLSFDNSLNNQVLCLTSENQHKKNQIPYEYFHSGKSQITWEKFEGYVVNSLQNMRMAKKHRLLKQELTEDDLQGFKERNLSDTKLISRFMKNYLLANLRLTGKYKQGVFCVNGKHTSTLRGFWRLQKIREDGDKHHALDAIVIACCTNRLMQYISTKYRQNRELELQRKEVAVPWPFPHFKHAVENSLLSIFVSRPPRKKVTGALHKNTFFSAKHIKKGIKTLRTDIQKLTLDSLKKQRELEVKHFGVERNKPLYDLIETALNNRPDDKMPIQVQMPTKNGGFVPVRHIKLISESTSGIPVLGGTALAENDSMPRVDVFLEDGQYYVVPVYTMDFAKGVLPLVAQPSGRLMKKENFVFSLYKDDYVNLVNKQGETWEGYFKQLNAQTGQIYLESHDRSAQYTVSGKLSNQKKIASSTLKLIEKYQIDIFGGKHLVKKEKYIGIIRKNKGFGG

SEQ ID NO: 305 - protein, 1027 aa, synthetic construct
  REGION 1..1027: note = MG73-10 effector
MTKILGLDLGIASIGYAVVELDEKNFEQGDILTSGVRIFDVAENPKDGASLSAPRREARALRRILRRKTIRLQQLRELFIKHHILSDQEVATLYQGPVPNVYQIRTEALQRQQSMQNICRALLHIAKRRGFRSMRKSAEEKDKETGELLKGIAQLKTLLTQSGCQTIGEFLYKLPQAEPKRNKAGSYTHSIARSMLEEEVNIILEKQRGFGNTAFTPEFEQDFCAIAFNQRPLLPSTPGKCTFEPNEPRAPKHAYTAELFAALSKINHIRIETKGTSRPLLEEERQIALDLCLEKEANNFAQLRTRLQLQDNEFFNISYVIPPAKQGTDYQPEKKTAIYKMTGYHTLRKALKQHNALWVKYMDNTDGILDKTAVILSTYKSDEEVTNALAKLQLPDEFINAVKPLSFAGFMHLSLKAMGKINPFLLQGYTYNEACERAGYNFQAKTANTRYAKLPVLTEEENFSITSPVVKRSITQTRKVVNALNRQYGPFDAVHVELAREMGRNHQDRKQMEQQQKDNLEEKELIKEQGIDGIFPKNALDIKKIRLWKEQDKRCMYSGKYIKPEQILEEGYCQVDHIIPYSISFDNTLSNQVLCLTKENQDKRNDIPFAYFQRIGRNWDEFSTRVEALPTMRQNKKQKLLRAQISSEDIAGFKDRNLNDTRFITTFVRNYLLKNLQLTGKYKQGVFCRNGKITADLRHMWGLSKIREEGDKHHALDAIVVACCSNAMMQHISTLYTHRKENSPVKIKHPFPFPWADFRTAVENTLLCIFVSRPPRKKVTGPLHKDTYYSAKHLNQGFKTLRTDINKLTLKSLAEQRELEIKYYGVERNKKLYDTIEQAVKARTDDKQPLEVFLGESKTPVKKIKLITEGNKGVPVLKGHAVAENGPMPRVDVFYKNGKYYLVPIYTIDFAKQELPLLSVPDNVPMDPKDFIFSLYKDDYIELKNKNGETYEGYFSQYNAQSGQIYLESHDRSATYTVSGKPSSEKKLNKNTFISFTKYQIDILGGKHAIKKEKYVGIRRKNKGFGG

SEQ ID NO: 306 - protein, 1098 aa, synthetic construct
  REGION 1..1098: note = MG74-1 active effector
MQVHDDVILGLDIGVGSLGWALLEEDLQTGEQRLLQRQTPQGETTYALGVRLFHVPENAKTKELLNVKRRTARMQRRTTARRAQRMRRVRALLDSLGVPGVRDADAFHLGKGRGAQCDPWQLRREGLERRLEAREWAVVLLHIAKHRGFRSNSKTDRSGSDKEMGQVLQAVSNLQQEVEASGLTVGALLASRERRRNRADHTGAPRYDLCMLRSLQENEVDILFTRQRELGNPLAGEEVRCRYAELAFAQRPLAPVSHMVGPCAFLEGERRAPRFAPTAELFRYVQALCNMRLRQETGEETPLSEEQRQAACAVFGSVQSVTYKKLRQVLRLPAGCRFAGLSYGVTEKGNVQDPEKADVVMRTGKCCQGTACLRGILGDAYEALHEQRLDEADAARLAATGALSAPAAALLARGMAGLRLTDAVARIVSELNDLDQIRAVLALLPLAAPRIAALSQAAGEGKLGIFQGTARLSLRAMEAILPHMLACGEYAAACELAGFDPRAAQKTDVTDIRNPVVLRVFREVRRQFSAICREFGFLPGRVHVELLREVGKSGEERNRISRGLERRTKEKEAARKAVAQLLGKSPETVSAGEVQRYELWRQQDGKCAYYMLWRHAGGERAYGDAMPQGSIPPDWLADGVNAVQVDHILPRSRTFDNSFHNLCLCCHAANQAKGGRTPWEWLGAAQPQAWHDFEQWVQSLPLKGLKKRNYLLRDLNAEVQGRFHARNLTDSGYVARLTLRWLEEEYARHDVPMQDADGRTRRRFFARPGQVTDFLRRHWGVQALKKIDGQRSGDRHHALDALLVAACSEGMLQRMVRAFQREENGPERLHIPCPWQDFSATVGRALGSVFVSRVERGRTKGPLHEETLRAIREERQPDGETRRVLYERKAVARLTAADLDKIKDAARCPDVVAALRRWLDAGKPGDALPRSAHGDIIRHVRVCAGEFSSGVVLQRGSGQAQASNGGMVRTDIYSRDGKFYMVPVYAKDVADKRLPLRACVAAKAEKDWREMTADYRFLFSLTPDCYVLTENRKGEVKEGYFAGANRNTSAISLSLAHDKQNVIQGIGITTLKRFEKYRVDRFGRLSLVRREADPRGRS

SEQ ID NO: 307 - protein, 1098 aa, synthetic construct
  REGION 1..1098: note = MG74-2 effector
MQVRDDVILGLDIGVGSLGWALLEEDLQTGEQRLLQRQTPQGETTYALGVRLFNVPENAKTKELLNVKRRTARMQRRTTARRAQRMRRIRALLDSLRVPGVRDADAFHLGKGRGAQCDPWQLRREGLERRLEAREWAVVLLHIAKHRGFRSNSKTDRSGSDKEMGQVLQAVSNLQQEVEASGLTVGALLASRERRRNRADHTGAPRYDLCMLRSLQENEVDILFTRQRELGNPLAGEEVRCRYVELAFAQRPLAPVSHMVGPCAFLEGERRAPRFAPTAELFRYVQALCNMRLRQETGEETPLSEEQRQAACAVFGSVQSVTYKKLRQVLRLPAGCRFAGLSYGVTEKGNVQDPEKADVVMRTGKCCQGTACLRGILGDAYEALHEQRLDEADAARLAATGALSAPAAALLARGMAGLRLTDAVARIVSELNDLDQIRAVLALLPLAAPRIAALSQAAGEGKLGIFQGTARLSLRAMEAILPHMLACGEYAAACELAGFDPRAAQKTDVTDIRNPVVLRVFREVRRQFSAICREFGFLPGRVHVELLREVGKSGEERNRISRGLERRTKEKEAARKAVAQLLGKSPETVSAGEAQRYELWRQQDGKCAYYMLWRHAGGERAYGDAMPQGSIPPAWLADGVNAVQVDHILPRSRTFDNSFHNLCLCCHAANQAKGGRTPWEWLGAAQPQAWHDFEQWVQSLPLKGLKKRNYLLRDLNAEVQGRFHARNLTDSGYVARLTLRWLEEEYARHDVPMQDADGRTRRRFFARPGQVTDFLRRHWGVQALKKIDGQRSGDRHHALDALLVAACSEGMLQRMVRAFQREENGPERLHIPCPWQDFSATVGRALGSVFVSRVERGRTKGPLHEETLRAIREERQPDGEMRRVLYERKAVARLTAADLDRIKDAARCPDVVAALRRWLDAGKPGDALPRSAHGDIIRHVRVCAGEFSSGVVLQRGSGQAQASNGGMVRTDIYSRDGKFYMVPVYAKDVADKRLPLRACVAAKAEKDWREMTADYRFLFSLTPDCYVLTENRKGEVKEGYFVGSDRSTAAISLSLAHDRQQSLRGIGITTLKRFEKYRVDRFGRLSPVRREADPRGRS

SEQ ID NO: 308 - protein, 1098 aa, synthetic construct
  REGION 1..1098: note = MG74-3 effector
MQVHDDVILGLDIGVGSLGWALLEEDLQTGEQRLLQRQTPQGETTYALGVRLFHVPENAKTKELLNVKRRTARMQRRTTARRAQRMRRVRALLDSLGVPGVRDADAFHLGKGRGAQCDPWQLRREGLERRLEAREWAVVLLHIAKHRGFRSNSKTDRSGSDKEMGQVLQAVSNLQQEVEASGLTVGALLASRERRRNRADHTGAPRYDLCMLRSLQENEVDILFTRQRELGNPLAGEEVRCRYAELAFAQRPLAPVSHMVGPCAFLEGERRAPRFAPTAELFRYVQALCNMRLRQETGEETPLSEEQRQAACAVFGSVQSVTYKKLRQVLRLPAGCRFAGLSYGVTEKGNVQDPEKADVVMRTGKCCQGTACLRGILGDAYEALHEQRLDEADAARLAATGALSAPAAALLARGMAGLRLTDAVARIVSELNDLDQIRAVLALLPLAAPRIAALSQAAGEGKLGIFQGSARLSLRAMEAILPHMLACGEYAAACELAGFDPRAAQKTDVTDIRNPVVLRVFREVRRQFSAICREFGFLPGRVHVELLREVGKSGEERNRISRGLERRTKEKEAARKAVAQLLGKSPETVSAGEVQRYELWRQQDGKCAYYMLWRHAGGERAYGDAMPQGSIPPAWLADGVNAVQVDHILPRSRTFDNSFHNLCLCCHAANQAKGGRTPWEWLGAAQPQAWHNFEQWVQSLPLKGLKKRNYLLRDLNAEVQGRFHARNLTDSGYVARLTLRWLEEEYARHDVPMQDADGRTRRRFFARPGQVTDFLRRHWGVQALKKIDGQRSGDRHHALDALLVAACSEGMLQRMVRAFQREENGPERLHIPCPWQDFSATVGRALGSVFVSRVERGRTKGPLHEETLRAIREERQPDGETRRVLYERKAVARLTAADLDKIKDAARCPDVVAALRRWLNAGKPGDALPRSAHGDIIRHVRVCAGEFSSGVVLQRGSGQAQASNGGMVRTDIYSRDGKFYMVPVYAKDVADKRLPLRACVAAKAEKDWREMTADYRFLFSLTPDCYVLTENRKGEVKEGYFAGANRNTSAISLSLAHDKQNVIQGIGITTLKRFEKYRVDRFGRLSLVRREADPRGRS

SEQ ID NO: 309 - protein, 1098 aa, synthetic construct
  REGION 1..1098: note = MG74-4 effector
MQVHDDVILGLDIGVGSLGWALLEEDLQTGEQRLLQRQTPQGETTYALGVRLFHVPENAKTKELLNVKRRTARMQRRTTARRAQRMRRVRALLDSLGVPGVRDADAFHLGKGRGAQCDPWQLRREGLERRLEAREWAVVLLHIAKHRGFRSNSKTDRSGSDKEMGQVLQAVSNLQQEVEASGLTVGALLASRERRRNRADHTGAPRYDLCMLRSLQENEVDILFTRQRELGNPLAGEEVRCRYAELAFAQRPLAPVSHMVGPCAFLEGERRAPRFAPTAELFRYVQALCNMRLRQETGEETPLSEEQRQAACAVFGSVQSVTYKKLRQVLRLPAGCRFAGLSYGVTEKGNVQDPEKADVVMRTGKCCQGTACLRGILGDAYEALHEQRLDEADAARLAATGALSAPAAALLARGMAGLRLTDAVARIVSELNDLDQIRAVLALLPLAAPQIAALSQAAGEGKLGIFQGTARLSLRAMEAILPHMLACGEYAAACELAGFDPRAAQKTDVTDIRNPVVLRVFREVRRQFSAICREFGFLPGRVHVELLREVGKSGEERNRISRGLERRTKEKEAARKAVAQLLGKSPETVSAGEVQRYELWRQQDGKCAYYMLWRHAGGERAYGDAMPQGSIPPDWLADGVNAVQVDHILPRSRTFDNSFHNLCLCCHAANQAKGGRTPWEWLGAAQPQAWHDFEQWVQSLPLKGLKKRNYLLRDLNAEVQGRFHARNLTDSGYVARLTLRWLEEEYARHDVPMQDADGRTRRRFFARPGQVTDFLRRHWGVQALKKIDGQRSGDRHHALDALLVAACSEGMLQRMVRAFQREENGPERLHIPCPWQDFSATVGRALGSVFVSRVERGRTKGPLHEETLRAIREERQPDGETRRVLYERKAVARLTAADLDKIKDAARCPDVVAALRRWLDAGKPGDALPRSAHGDIIRHVRVCAGEFSSGVVLQRGSGQAQASNGGMVRTDIYSRDGKFYMVPVYAKDVADKRLPLRACVAAKAEKDWREMTADYRFLFSLTPDCYVLTENRKGEVKEGYFAGANRNTSAISLSLAHDKQNVIQGIGITTLKRFEKYRVDRFGRLSLVRREADPRGRS

SEQ ID NO: 310 - protein, 1098 aa, synthetic construct
  REGION 1..1098: note = MG74-5 effector
MQVHDDVILGLDIGVGSLGWALLEEDLQTGEQRLLQRQTPQGETTYALGVRLFHVPENAKTKELLNVKRRTARMQRRTTARRAQRMRRVRALLDSLGVPGVRDADAFHLGKGRGAQCDPWQLRREGLERRLEAREWAVVLLHIAKHRGFRSNSKTDRSGSDKEMGQVLQAVSNLQQEVEASGLTVGALLASRERRRNRADHTGAPRYDLCMLRSLQENEVDILFTRQRELGNPLAGEEVRCRYAELAFAQRPLAPVSHMVGPCAFLEGERRAPRFAPTAELFRYVQALCNMRLRQETGEETPLSEEQRQGAGAVFGSVQSVTYKKLRQVLRLPAGCRFAGLSYGVTEKGNVQDPEKADVVMRTGKCCQGTACLRGILGDAYEALHEQRLDEADAARLAATGALSAPAAALLARGMAGLRLTDAVARIVSELNDLDQIRAVLALLPLAAPRIAALSQAAGEGKLGIFQGSASLSLRAMEAILPHMLACGEYAAACELAGFDPRAAQKTDVTDIRNPVVLRVFREVRRQFSAICREFGFLPGRVHVELLREVGKSGEERNRISRGLERRTKEKEAARKAVAQLLGKSPETVSAGEVQRYELWRQQDGKCAYYMLWRHAGGERAYGDAMPQGSIPPAWLADGVNAVQVDHILPRSRTFDNSFHNLCLCCHAANQAKGGRTPWEWLGAAQPQAWHDFEQWVQSLPLKGLKKRNYLLRDLNAEVQGRFHARNLTDSGYVARLTLRWLEEEYARHDVPMQDADGRTRRRFFARPGQVTDFLRRHWGVQALKKIDGQRSGDRHHALDALLVAACSEGMLQRMVRAFQREENGPERLHIPCPWQDFSATVGRALGSVFVSRVERGRTKGPLHEETLRAIREERQPDGETRRVLYERKAVARLTAADLDKIKDAARCPDVVAALRRWLDAGKPGDALPRSAHGDIIRHVRVCAGEFSSGVVLQRGSGQAQASNGGMVRTDIYSRDGKFYMVPVYAKDVADKRLPLRACVAAKAEKDWREMTADYRFLFSLTPDCYVLTENRKGEVKEGYFAGANRNTSAISLSLAHDKQNVIQGIGITTLKRFEKYRVDRFGRLSLVRREADPRGRS

SEQ ID NO: 311 - protein, 1098 aa, synthetic construct
  REGION 1..1098: note = MG74-6 effector
MQVHDDVILGLDIGVGSLGWALLEEDLQTGEQRLLQRQTPQGETTYALGVRLFHVPENAKTKELLNVKRRTARMQRRTTARRAQRMRRVRALLDSLGVPGVRDADAFHLGKGRGAQCDPWQLRREGLERRLEAREWAVVLLHIAKHRGFRSNSKTDRSGSDKEMGQVLQAVSNLQQEVEASGLTVGALLASRERRRNRADHTGAPRYDLCMLRSLQENEVDILFTRQRELGNPLAGEEVRCRYAELAFAQRPLAPVSHMVGPCAFLEGERRAPRFAPTAELFRYVQALCNMRLRQETGEETPLSEEQRQAACAVFGSVQSVTYKKLRQVLRLPAGCRFAGLSYGVTEKGNVQDPEKADVVMRTGKCCQGTACLRGILGDAYEALHEQRLDEADAARLAATGALSAPAAALLARGMAGLRLTDAVARIVSELNDLDQIRAVLVLLPLAAPRIAALSQAAGEGKLGIFQGSARLSLRAMEAILPHMLACGEYAAACELAGFDPRAAQKTDVTDIRNPVVLRVFREVRRQFSAICREFGFLPGRVHVELLREVGKSGEERNRISRGLERRTKEKEAARKAVAQLLGKSPETVSAGEVQRYELWRQQDGKCAYYMLWRHAGGERAYGDAMPQGSIPPAWLADGVNAVQVDHILPRSRTFDNSFHNLCLCCHAANQAKGGRTPWEWLGAAQPQAWHDFEQWVQSLPLKGLKKRNYLLRDLNAEVQGRFHARNLTDSGYVARLTLRWLEEEYARHDVPMQDADGRTRRRFFARPGQVTDFLRRHWGVQALKKIDGQRSGDRHHALDALLVAACSEGMLQRMVRAFQREENGPERLHIPCPWQDFSATVGRALGSVFVSRVERGRTKGPLHEETLRAIREERQPDGETRRVLYERKAVARLTAADLDKIKDAARCPDVVAALRRWLDAGKPGDALPRSAHGDIIRHVRVCAGEFSSGVVLQRGSGQAQASNGGMVRTDIYSRDGKFYMVPVYAKDVADKRLPLRACVAHKDEKDWREMTADYRFLFSLTPDCYVLTENRKGEVKEGYFAGANRNTSAISLSLAHDKQNVIQGIGITTLKRFEKYRVDRFGRLSPVRREADPRGRS

SEQ ID NO: 312 - protein, 1098 aa, synthetic construct
  REGION 1..1098: note = MG74-7 effector
MQVHDDVILGLDIGVGSLGWALLEEDLQTGEQRLLQRQTPQGETTYALGVRLFHVPENAKTKELLNVKRRTARMQRRTTARRAQRMRRVRALLDSLGVPGVRDADAFHLGKGRGAQCDPWQLRREGLERRLEAREWAVVLLHIAKHRGFRSNSKTDRSGSDKEMGQVLQAVSNLQQEVEASGLTVGALLASRERRRNRADHTGAPRYDLCMLRSLQENEVDILFTRQRELGNPLAGEEVRCRYAELAFAQRPLAPVSHMVGPCAFLEGERRAPRFAPTAELFRYVQALCNMRLRQETGEETPLSEEQRQAACAVFGSVQSVTYKKLRQVLRLPAGCRFAGLSYGVTEKGNVQDPEKADVVMRTGKCCQGTACLRGILGDAYEALHEQRLDEADAARLAATGALSAPAAALLARGMAGLRLTDAVARIVSELNDLDQIRAVLALLPLAAPRIAALSQAAGEGKLGIFQGTARLSLRAMEAILPHMLACGEYAAACELAGFDPRAAQKTDVTDIRNPVVLRVFREVRRQFSAICREFGFLPGRVHVELLREVGKSGEERNRISRGLERRTKEKEAARKAVAQLLGKSPETVSAGEVQRYELWRQQDGKCAYYMLWRHAGGERAYGDAMPQGSIPPAWLADGVNAVQVDHILPRSRTFDNSFHNLCLCCHAANQAKGGRTPWEWLGAAQPQAWHDFEQWVQSLPLKGLKKRNYLLRDLNAEVQGRFHARNLTDSGYVARLTLRWLEEEYARHDVPMQDADGRTRRRFFARPGQVTDFLRRHWGVQALKKIDGQRSGDRHHALDALLVAACSEGMLQRMVRAFQREENGPERLHIPCPWQDFSATVGRALGSVFVSRVERGRTKGPLHEETLRAIREERQPDGETRRVLYERKAVARLTAADLDKIKDAARCPDVVAALRRWLDAGKPGDALPRSAHGDIIRHVRVCAGEFSSGVVLQRGSGQAQASNGGMVRTDIYSRDGKFYMVPVYAKDVADKRLPLRACVAHKDEKDWPEMTADYRFLFSLTPDCYVLTENRKGEIKEGYFSGADRSSANISLTLAHDRKSSIRGIGIQKLRRFEKYRVDRFGRLSPVRREADPRGRS

SEQ ID NO: 313 - protein, 1067 aa, synthetic construct
  REGION 1..1067: note = MG74-8 effector
MRIAENIVLGLDLGSSSIGWALIEESPITLEKHILQKVSPDGIVTYAVGSRIIDAPEDAKTHELLNVARRQKRSVRRVIARKAQRMKAVRNLIAEAGVPEIKNLDAVHHEKGTPQNSPWELRSRGLQSPLSDLEFAVALIHIAKHRGFRSNSKNENNDDAGKVKESLRELERKLKESGAETIGQFMAEQSDRRNRKNYKGEAQYTHMVMRSWQEQEVHLLFERQRDFGNRLAASGIEERFCSLAFNQRELKSVASMVGNCVFLEHEKRAPAFSPTAEFFRFLQKVVHLRVRENDEVRPLSLAEQQTMIELFGCTAKITYKSVRRKLKFGPDVFFDELSYPMSNGVIDMKEENADVVRRSGASCAGTMALKSCLGPELFENLRQERTGEDDRYPGWPVIDRIAKILSDNDGFDSMEHELAELDIDDSIRKNIMVCAREGKFSAFRGTMNLSVKAMRALIPFMRKGMRYDEACDAAGFDHAREREVEINDIRNPVVQHLLREVKRQVRAVCHEFGLWPGRVNIEMLRDVGKSASERKKMDSGIRSRTSERERHRKALEEKWNRPPSAAELKRYELWLEQNEHCAYAQLLGADSPVYRGAPGGHIPLDWLKDGMNHVQIDHILPRSRTFDNSRNNQCLCLAGANQSKLNKTPFEWKGNADAEAWHRYSVWINGLPVKARKKRFFLLKDLSGEVEGRFHARNVTDSAYTARLVAQWFRNEYAYRLKDAPDEERNCRRVYTRPGAVTNFLRHVWGVQSLKKNEQGEREGDQHHALDAVIVACCTEGMLQAITRQFKKNELEGLNDRLPRPWNHFRESLEPVINSVSVSREIKSKKTGALHEETLRSLREETVNGVNRQMVYERKWVNDLTMRDLENIKDPERCRKLVSALRTWLALPEKSRPPFTDPDSGNVVRHVRVRRGEFSSGVTLKRGSGVAQADNGEMARTDVYSRDGRFYLVPVYMKDIADGRLPLRACRNATPEAQWPVMDESYEFLFSLTKNCYVLTKKRETIREGYYVGMDRTTAAISLSLAEDKQKKIKGIGVLQLDHFEKYIVDRLGRRVRVTRERDPRRS

SEQ ID NO: 314 - protein, 1098 aa, synthetic construct
  REGION 1..1098: note = MG74-9 effector
MQVRDDVILGLDIGVGSLGWALLEEDLQTGEQRLLQRQTPQGETTYALGVRLFHVPENAKTKELLNVKRRTARMQRRTTARRAQRMRRVRALLDSLGVPGVRDADAFHLGKGRGAQCDPWQLRREGLERRLEAREWAVVLLHIAKHRGFRSNSKTDRSGSDKEMGQVLQAVSNLQQEVEASGLTVGALLASRERRRNRADHTGAPRYDLCMLRSLQENEVDILFTRQRELGNPLAGEEVRCRYAELAFAQRPLAPVSHMVGPCAFLEGERRAPRFAPTAELFRYVQALCNMRLRQETGEETPLSEEQRQAACAVFGSVQSVTYKKLRQVLRLPAGCRFAGLSYGVTEKGNVQDPEKADVVMRTGKCCQGTACLRGILGDAYEALHEQRLDEADAARLAATGALSAPAAALLARGMAGLRLTDALVRIVSELNDLGQIRALLALLPLPAPRIAALSQAAGEGKLGFFQGTARLSLRAMEAILPHMLACGEYAAACELAGFDPRAAQKTDVTDIRNPVVLRVFREVRRQFSAICREFGFLPGRVHVELLREVGKSGEERNRISRGLERRTKEKEAARKAVAQLLGKSPEAVSAGEVQRYELWRQQDGKCAYYMLWRHAGGERAYGNAMPQGSIPPAWLADGVNAVQVDHILPRSRTFDNSFHNLCLCCHAANQAKGGRTPWEWLGAAQPQAWHDFEQWVQSLPLKGLKKRNYLLRDLSAEVQGRFHARNLTDSSYVARLTLRWLEEEYARHDVPMQDAEGRTRRRFFARPGQVTDFLRRHWGVQALKKIDGQRSGDRHHALDALLVAACSEGMLQRMVRAFQREENGPERLHIPCPWQDFSTTVGRALGSVFVSRVERGRTKGPLHEETLRAIREERQPDGETRRVLYERKAVARLTVADLDRIKDAARCPDVVAALRRWLDAGKPGDDLPRSAHGDIIRHVRVRAGEFSSGVILQRGSGQAQAKNGGIVRTDIYSRDGKFYMVPVYAKDVADKRLPLRACVAHKDEKDWLELTEDYHFLFSLTPDCYVLTENRKGEVKEGYFEGPDRGSANISLSLAHDKKNTIRGIGIQNLKRFEKYRVDRFGRLSLVRREADPRGRS

SEQ ID NO: 315 - protein, 412 aa, synthetic construct
  REGION 1..412: note = MG74-10 effector
MQVRDDVILGLDIGVGSLGWALLEEDLQTGEQRLLQRQTSQGETTYALGVRLFHVPENAKTKELLNVKRRTARMQRRTTARRAQRMRRVRALLDSLGVPGVRDADAFHLGKGRGAQCDPWQLRREGLERRLEAREWAVVLLHIAKHRGFRSNSKTDRSGSDKEMGQVLQAVSNLQQEVEASGLTVGALLASRERRRNRADHTGAPRYDLCMLRSLQENEVDILFTRQRELGNPLAGEEVRCRYAELAFAQRPLAPVSHMVGPCAFLEGERRAPRFAPTAELFRYVQALCNMRLRQETGEETPLSEEQRQAACAVFGSVQSVTYKKLRQVLRLPAGCRFAGLSYGVTEKGNVQDPEKADVVMRTGKCCQGTACLRGILGDAYEALHEQRLDEADAARLAATGAFVAVKHPFLV

SEQ ID NO: 316 - protein, 1098 aa, synthetic construct
  REGION 1..1098: note = MG74-11 effector
MQVHDDVILGLDIGVGSLGWALLEEDLQTGEQRLLQRQTPQGETTYALGVRLFHVPENAKTKELLNVKRRTARMQRRTTARRAQRMRRVRALLDSLGVPGVRDADAFHLGKGRGAQCDPWQLRREGLERRLEAREWAVVLLHIAKHRGFRSNSKTDRSGSDKEMGQVLQAVSNLQQEVEASGLTVGALLASRERRRNRADHTGAPRYDLCMLRSLQENEVDILFTRQRELGNPLAGEEVRCRYAELAFAQRPLAPVSHMVGPCAFLEGERRAPRFAPTAELFRYVQALCNMRLRQETGEETPLSEEQRQAACAVFGSVQSVTYKKLRQVLRLPAGCRFAGLSYGVTEKGNVQDPEKADVVMRTGKCCQGTACLRGILGDAYEALHEQRLDEADAARLAATGALSAPAAALLARGMAGLRLTDAVARIVSELNDLDQIRAVLALLPLAAPRIAALSQAAGEGKLGIFQGSARLSLRAMEAILPHMLACGEYAAACELAGFDPRAAQKTDVTDIRNPVVLRVFREVRRQFSAICREFGFLPGRVHVELLREVGKSGEERNRISRGLERRTKEKEAARKAVAQLLGKSPETVSAGEVQRYELWRQQDGKCAYYMLWRHAGGERAYGDAMPQGSIPPAWLADGVNAVQVDHILPRSRTFDNSFHNLCLCCHAANQAKGGRTPWEWLGAAQPQAWHDFEQWVQSLPLKGLKKRNYLLRDLNAEVQGRFHARNLTDSGYVARLTLRWLEGEYARHDVPMQDADGRTRRRFFARPGQVTDFLRRHWGVQALKKIDGQRSGDRHHALDALLVAACSEGMLQRMVRAFQREENGPERLHIPCPWQDFSATVGRALGSVFVSRVERGRTKGPLHEETLRAIREERQPDGETRRVLYERKAVARLTAADLDKIKDAARCPDVVAALRRWLNAGKPGDALPRSAHGDIIRHVRVCAGEFSSGVVLQRGSGQAQASNGGMVRTDIYSRDGKFYMVPVYAKDVADKRLPLRACVAAKAEKDWREMTADYRFLFSLTPDCYVLTENRKGEVKEGYFAGANRNTSAISLSLAHDKQNVIQGIGITTLKRFEKYRVDRFGRLSPVRREADPRGRS

SEQ ID NO: 317 - protein, 1098 aa, synthetic construct
  REGION 1..1098: note = MG74-12 effector
MQVHDDVILGLDIGVGSLGWALLEEDLQTGEQRLLQRQTPQGETTYALGVRLFHVPENAKTKELLNVKRRTARMQRRTTARRAQRMRRVRALLDSLGVPGVRDADAFHLGKGRGAQCDPWQLRREGLERRLEAREWAVVLLHIAKHRGFRSNSKTDRSGSDKEMGQVLQAVSNLQQEVEASGLTVGALLASRERRRNRADHTGAPRYDLCMLRSLQENEVDILFTRQRELGNPLAGEEVRCRYAELAFAQRPLAPVSHMVGPCAFLEGERRAPRFAPTAELFRYVQALCNMRLRQETGEETPLSEEQRQAADAVFGSVQSVTYKKLRQVLRLPAGCRFAGLSYGVTEKGNVQDPEKADVVMRTGKCCQGTACLRGILGDAYEALHEQRLDEADAARLAATGALSAPAAALLARGMAGLRLTDAVARIVSELNDLDQIRAVLALLPLAAPRIAALSQAAGEGKLGIFQGSASLSLRAMEAILPHMLACGEYAAACELAGFDPRAAQKTDVTDIRNPVVLRVFREVRRQFSAICREFGFLPGRVHVELLREVGKSGEERNRISRGLERRTKEKEAARKAVAQLLGKSPETVSAGEVQRYELWRQQDGKCAYYMLWRHAGGERAYGDAMPQGSIPPAWLADGVNAVQVDHILPRSRTFDNSFHNLCLCCHAANQAKGGRTPWEWLGAAQPQAWHDFEQWVQSLPLKGLKKRNYLLRDLNAEVQGRFHARNLTDSGYVARLTLRWLEEEYARHDVPMQDADGRTRRRFFARPGQVTDFLRRHWGVQALKKIDGQRSGDRHHALDALLVAACSEGMLQRMVRAFQREENGPERLHIPCPWQDFSATVGRALGSVFVSRVERGRTKGPLHEETLRAIREERQPDGETRRVLYERKAVARLTAADLDKIKDAARCPDVVAALRRWLDAGKPGDALPRSAHGDIIRHVRVCAGEFSSGVVLQRGSGQAQASNGGMVRTDIYSRDGKFYMVPVYAKDVADKRLPLRACVAAKAEKDWREMTADYRFLFSLTPDCYVLTENRKGEVKEGYFAGANRNTSAISLSLAHDKQNVIQGIGITTLKRFEKYRVDRFGRLSLVRREADPRGRS

SEQ ID NO: 318 - protein, 1098 aa, synthetic construct
  REGION 1..1098: note = MG74-13 effector
MQVHDDVILGLDIGVGSLGWALLEEDLQTGEQRLLQRQTPQGETTYALGVRLFHVPENAKTKELLNVKRRTARMQRRTTARRAQRMRRVRALLDSLGVPGVRDADAFHLGKGRGAQCDPWQLRREGLERRLEAREWAVVLLHIAKHRGFRSNSKTDRSGSDKEMGQVLQAVSNLQQEVEASGLTVGALLASRERRRNRADHTGAPRYDLCMLRSLQENEVDILFTRQRELGNPLAGEEVRCRYAELAFAQRPLAPVSHMVGPCAFLEGERRAPRFAPTAELFRYVQALCNMRLRQETGEETPLSEEQRQAACAVFGSVQSVTYKKLRQVLRLPAGCRFAGLSYGVTEKGNVQDPEKADVVMRTGKCCQGTACLRGILGDAYEALHEQRLDEADAARLAATGALSAPAAALLARGMAGLRLTDAVARIVSELNDLDQIRAVLALLPLAAPRIAALSQAAGEGKLGIFQGSARLSLRAMEAILPHMLACGEYAAACELAGFDPRAAQKTDVTDIRNPVVLRVFREVRRQFSAICREFGFLPGRVHVELLREVGKSGEERNRISRGLERRTKEKEAARKAVAQLLGKSPETVSAGEVQRYELWRQQDGKCAYYMLWRHAGGERAYGDAMPQGSIPPAWLADGVNAVQVDHILPRSRTFDNSFHNLCLCCHAANQAKGGRTPWEWLGAAQPQAWHDFEQWVQSLPLKGLKKRNYLLRDLNAEVQGRFHARNLTDSGYVARLTLRWLEEEYARHDVPMQDADGRTRRRFFARPGQVTDFLRRHWGVQALKKIDGQRSGDRHHALDALLVAACSEGMLQRMVRAFQREENGPERLHIPCPWQDFSATVGRALGSVFVSRVERGRTKGPLHEETLRAIREERQPDGETRRVLYERKAVARLTAADLDKIKDAARCPDVVAALRRWLDAGKPGDALPRSAHGDIIRHVRVCAGEFSSGVVLQRGSGQAQASNGGMVRTDIYSRDGKFYMVPVYAKDVADKRLPLRACVAAKAEKDWREMTADYRFLFSLTPDCYVLTENRKGEVKEGYFAGANRNTSAISLSLAHDKQNVIQGIGITTLKRFEKYRVDRFGRLSLVRREADPRGRS

SEQ ID NO: 319 - protein, 974 aa, synthetic construct
  REGION 1..974: note = MG74-14 effector
MQVHDDVILGLDIGVGSLGWALLEEDLQTGEQRLLQRQTPQGETTYALGVRLFHVPENAKTKELLNVKRRTARMQRRTTARRAQRMRRVRALLDSLGVPGVRDADAFHLGKGRGAQCDPWQLRREGLERRLEAREWAVVLLHIAKHRGFRSNSKTDRSGSDKEMGQVLQAVSNLQQEVEASGLTVGALLASRERRRNRADHTGAPRYDLCMLRSLQENEVDILFTRQRELGNPLAGEEVRCRYAELAFAQRPLAPVSHMVGPCAFLEGERRAPRFAPTAELFRYVQALCNMRLRQETGEETPLSEEQRQAACAVFGSVQSVTYKKLRQVLRLPAGCRFAGLSYGVTEKGNVQDPEKADVVMRTGKCCQGTACLRGILGDAYEALHEQRLDEADAARLAATGALSAPAAALLARGMAGLRLTDAVARIVSELNDLDQIRAVLALLPLAAPRIAALSQAAGEGKLGIFQGSARLSLRAMEAILPHMLACGEYAAACELAGFDPRAAQKTDVTDIRNPVVLRVFREVRRQFSAICREFGFLPGRVHVELLREVGKSGEERNRISRGLERRTKEKEAARKAVAQLLGKSPETVSAGEVQRYELWRQQDGKCAYYMLWRHAGGERAYGDAMPQGSIPPAWLADGVNAVQVDHILPRSRTFDNSFHNLCLCCHAANQAKGGRTPWEWLGAAQPQAWHDFEQWVQSLPLKGLKKRNYLLRDLNAEVQGRFHARNLTDSGYVARLTLRWLEGEYARHDVPMQDADGRTRRRFFARPGQVTDFLRRHWGVQALKKIDGQRSGDRHHALDALLVAACSEGMLQRMVRAFQREENGPERLHIPCPWQDFSATVGRALGSVFVSRGTRPHQGPPARGDPARHTRGTAARRGDAARAVRAQGRGQADGGRPGQDQGRRPLPGRGGGPAPLAECGQARGCPAPLGTWRHHPACARLRRRVQQRRGAATGIGTGPSQQRRHGAHGHLQP

SEQ ID NO: 320 - protein, 1098 aa, synthetic construct
  REGION 1..1098: note = MG74-15 effector
MQVRDDVILGLDIGVGSLGWALLEEDLQTGEQRLLQRQAPQGETSYALGVRLFNVPENAKTKELLNVKRRTARMQRRTTARRAQRMRRVRALLDSLGVLGVRDADAFHLGKGRGAQCDPWQLRREGLERRLEAREWAVVLLHIAKHRGFRSNSKTDSSGSDKEMGQVLQAVSNLQQEVEASGLTVGALLASRERRRNRADHTGAPRYDLCMLRSLQEDEVNILFTRQRELGNPLAGEDIRCRYAELAFAQRPLAPVSHMVGPCAFLEGERRAPRFAPTAELFRYVQALCTMRLRQETGEETPLSEEQRQAACAVFGSVQSVTYKKLRQVLRLPAGCRFVGLSYGVTEKGKVQDPEKADVVMRTGKCCQGTACLRGILGDAYDALHEQRLDEADAARLAATDALSAPAAALLARGMAGLRLTDALVRIVSELNDLGQIRAILALLPLPAPRIAALSQAAGEGKLGFFQGTARLSLRAMEAILPHMQACGEYAAACELAGFDPRAAQKTDVTDIRNPVVLRVFREVRRQFSAICREFGFLPGRVHVELLREVGKSGEERNRISRGLERRTKEKEAARKAVAQLLGKSPEAVSAGEVQRYELWRQQDGKCAYYMLWRHAGGERAYGNAMPQGSIPPAWLADGVNAVQVDHILPRSRTFDNSFHNLCLCCHAANQAKGGRTPWEWLGAAQPQAWHDFEQWVQSLPLKGLKKRNYLLRDLSAEVQGRFHARNLTDSSYVARLTLRWLEEEYARHDVPMQDAEGRTRRRFFARPGQVTDFLRRHWGVQALKKIDGQRSGDRHHALDALLVAACSEGMLQRMVRAFQREENGPERLHIPCPWQDFSATVGRALGSVFVSRVERGRTKGPLHEETLRAIREERQPDGETRRVLYERKAVARLTAADLDRIKDAARCPDVVAALRRWLDAGKPGDALPRSAHGDIIRHVRVCAGEFSSGVVLQRGSGQAQASNGGMVRTDIYSRDGKFYMVPVYAKDVADRRLPLRACVAAKAEKDWREMTADYRFLFSLTPDCYVLTENRKGEVKEGYFIGSDRSTAAISLSLAHDRQQSLRGIGITTLKRFEKYRVDRFGRLSPVRREADPRGRS

SEQ ID NO: 321 - protein, 1098 aa, synthetic construct
  REGION 1..1098: note = MG74-16 effector
MQVHDDVILGLDIGVGSLGWALLEEDLQTGEQRLLQRQTPQGETTYALGVRLFHVPENAKTKELLNVKRRTARMQRRTTARRAQRMRRVRALLDSLGVPGVRDADAFHLGKGRGAQCDPWQLRREGLERRLEAREWAVVLLHIAKHRGFRSNSKTDRSGSDKEMGQVLQAVSNLQQEVEASGLTVGALLASRERRRNRADHTGAPRYDLCMLRSLQENEVDILFTRQRELDNPLAGEEVRCRYAELAFAQRPLAPVSHMVGPCAFLEGERRAPRFAPTAELFRYVQALCNMRLRQETGEETPLSEEQRQAACAVFGSVQSVTYKKLRQVLRLPAGCRFAGLSYGVTEKGNVQDPEKADVVMRTGKCCQGTACLRGILGDAYEALHEQRLDEADAARLAATGALSAPAAALLARGMAGLRLTDAVARIVSELNDLDQIRAVLALLPLAAPRIAALSQAAGEGKLGIFQGSARLSLRAMEAILPHMLACGEYAAACELAGFDPRAAQKTDVTDIRNPVVLRVFREVRRQFSAICREFGFLPGRVHVELLREVGKSGEERNRISRGLERRTKEKEAARKAVAQLLGKSPETVSAGEVQRYELWRQQDGKCAYYMLWRHAGGERAYGDAMPQGSIPPDWLADGVNAVQVDHILPRSRTFDNSFHNLCLCCHAANQAKGGRTPWEWLGAAQPQAWHDFEQWVQSLPLKGLKKRNYLLRDLNAEVQGRFHARNLTDSGYVARLTLRWLEEEYARHDVPMQDADGRTRRRFFARPGQVTDFLRRHWGVQALKKIDGQRSGDRHHALDALLVAACSEGMLQRMVRAFQREENGPERLHIPCPWQDFSATVGRALGSVFVSRVERGRTKGPLHEETLRAIREERQPDGETRRVLYERKAVARLTAADLDKIKDAARCPDVVAALRRWLDAGKPGDALPRSAHGDIIRHVRVCAGEFSSGVVLQRGSGQAQASNGGMVRTDIYSRDGKFYMVPVYAKDVADKRLPLRACVAAKAEKDWREMTADYRFLFSLTPDCYVLTENRKGEVKEGYFAGANRNTSAISLSLAHDKQNVIQGIGITTLKRFEKYRVDRFGRLSLVRREADPRGRS

SEQ ID NO: 322 - protein, 1098 aa, synthetic construct
  REGION 1..1098: note = MG74-17 effector
MQVHDDVILGLDIGVGSLGWALLEEDLQTGEQRLLQRQTPQGETTYALGVRLFHVPENAKTKELLNVKRRTARMQRRTTARRAQRMRRVRALLDSLGVPGVRDADAFHLGKGRGAQCDPWQLRREGLERRLEAREWAVVLLHIAKHRGFRSNSKTDRSGSDKEMGQVLQAVSNLQQEVEASGLTVGALLASRERRRNRADHTGAPRYDLCMLRSLQENEVDILFTRQRELDNPLAGEEVRCRYAELAFAQRPLAPVSHMVGPCAFLEGERRAPRFAPTAELFRYVQALCNMRLRQETGEETPLSEEQRQAACAVFGSVQSVTYKKLRQVLRLPAGCRFAGLSYGVTEKGNVQDPEKADVVMRTGKCCQGTACLRGILGDAYEALHEQRLDEADAARLAATGALSAPAAALLARGMAGLRLTDAVARIVSELNDLDQIRAVLALLPLAAPRIAALSQAAGEGKLGIFQGTARLSLRAMEAILPHMLACGEYAAACELAGFDPRAAQKTDVTDIRNPVVLRVFREVRRQFSAICREFGFLPGRVHVELLREVGKSGEERNRISRGLERRTKEKEAARKAVAQLLGKSPETVSAGEVQRYELWRQQDGKCAYYMLWRHAGGERAYGDAMPQGSIPPAWLADGVNAVQVDHILPRSRTFDNSFHNLCLCCHAANQAKGGRTPWEWLGAAQPQAWHDFEQWVQSLPLKGLKKRNYLLRDLNAEVQGRFHARNLTDSGYVARLTLRWLEEEYARHDVPMQDADGRTRWRFFARPGQVTDFLRRHWGVQALKKIDGQRSGDRHHALDALLVAACSEGMLQRMVRAFQREENGPERLHIPCPWQDFSATVGRALGSVFVSRVERGRTKGPLHEETLRAIREERQPDGETRRVLYERKAAARLTAADLDKIKDAARCPDVVAALRRWLNAGKPGDALPRSAHGDIIRHVRVCAGEFSSGVVLQRGSGQAQASNGGMVRTDIYSRDGKFYMVPVYAKDVADKRLPLRACVAAKAEKDWREMTADYRFLFSLTPDCYVLTENRKGEVKEGYFAGANRNTSAISLSLAHDKQNVIQGIGITTLKRFEKYRVDRFGRLSLVRREADPRGRS

SEQ ID NO: 323 - protein, 1098 aa, synthetic construct
  REGION 1..1098: note = MG74-18 effector
MQVHDDVILGLDIGVGSLGWALLEEDLQTGEQRLLQRQTPQGETTYALGVRLFHVPENAKTKELLNVKRRTARMQRRTTARRAQRMRRVRALLDSLGVPGVRDADAFHLGKGRGAQCDPWQLRREGLERRLEAREWAVVLLHIAKHRGFRSNSKTDRSGSDKEMGQVLQAVSNLQQEVEASGLTVGALLASRERRRNRADHTGAPRYDLCMLRSLQENEVDILFTRQRELGNPLAGEEVRCRYAELAFAQRPLAPVSHMVGPCAFLEGERRAPRFAPTAELFRYVQALCNMRLRQETGEETPLSEEQRQAACAVFGSVQSVTYKKLRQVLRLPAGCRFAGLSYGVTEKGNVQDPEKADVVMRTGKCCQGTACLRGILGDAYEALHEQRLDEADAARLAATGALSAPAAALLARGMAGLRLTDAVARIVSELNDLDQIRAVLALLPLAAPRIAALSQAAGEGKLGIFQGSARLSLRAMEAILPHMLACGEYAAACELAGFDPRAAQKADVTDIRNPVVLRVFREVRRQFSAICREFGFLPGRVHVELLREVGKSGEERNRISRGLERRTKEKEAARKAVAQLLGKSPEAVSAGEVQRYELWRQQDGKCAYYMLWRHAGGERAYGNAMPQGSIPPAWLADGVNAVQVDHILPRSRTFDNSFHNLCLCCHAANQAKGGRTPWEWLGAAQPQAWHDFEQWVQSLPLKGLKKRNYLLRDLSAEVQGRFHARNLTDSSYVARLTLRWLEEEYARHDVPMQDAEGRTRRRFFARPGQVTDFLRRHWGVQALKKIDGQRSGDRHHALDALLVAACSEGMLQRMVRAFQREENGPERLHIPCPWQDFSATVGRALGSVFVSRVERGRTKGPLHEETLRAIREERQPDGETRRVLYERKAVARLTAADLDRIKDAARCPDVVAALRRWLDAGKPGDALPRSAHGDIIRHVRVCAGEFSSGVVLQRGSGQAQASNGGMVRTDIYSRDGKFYMVPVYAKDVADRRLPLRACVAAKAEKDWREMTADYRFLFSLTPDCYVLTENRKGEVKEGYFIGSDRSTAAISLSLAHDRQQSLRGIGITTLKRFEKYRVDRFGRLSSVRREADPRGRS

SEQ ID NO: 324 - protein, 583 aa, synthetic construct
  REGION 1..583: note = MG74-19 effector
MVLRVFREVRRQFSAICREFGFLPGRVHVELLREVGKSGEERNRISRGLERRTKEKEAARKAVAQLLGKSPETVSAGEVQRYELWRQQDGKCAYYMLWRHAGGERAYGDAMPQGSIPPAWLADGVNAVQVDHILPRSRTFDNSFHNLCLCCHAANQAKGGRTPWEWLGAAQPQAWHDFEQWVQSLPLKGLKKRNYLLRDLNAEVQGRFHARNLTDSGYVARLTLRWLEEEYARHDVPMQDADGRTRWRFFARPGQVTDFLRRHWGVQALKKIDGQRSGDRHHALDALLVAACSEGMLQRMVRAFQREENGPERLHIPCPWQDFSATVGRALGSVFVSRVERGRTKGPLHEETLRAIREERQPDGETRRVLYERKAAARLTAADLDKIKDAARCPDVVAALRRWLNAGKPGDALPRSAHGDIIRHVRVCAGEFSSGVVLQRGSGQAQASNGGMVRTDIYSRDGKFYMVPVYAKDVADKRLPLRACVAAKAEKDWREMTADYRFLFSLTPDCYVLTENRKGEVKEGYFAGANRNTSAISLSLAHDKQNVIQGIGITTLKRFEKYRVDRFGRLSLVRREADPRGRS

SEQ ID NO: 325 - protein, 1099 aa, synthetic construct
  REGION 1..1099: note = MG74-20 effector
MQVRDDVILGLDIGVGSLGWALLEEDLQTGEQRLLQRQTPQGETTYALGVRLFHVPEKNAKTKELLNVKRRTARMQRRTTARRAQRMRRVRALLDSLGVPGVRDADAFHLGKGRGAQCDPWQLRREGLERRLEAREWAVVLLHIAKHRGFRSNSKTDRSGSDKEMGQVLQAVSNLQQEVEASGLTVGALLASRERRRNRADHTGAPRYDLCMLRSLQENEVDILFTRQRELGNPLAGEEVRCRYAELAFAQRPLAPVSHMVGPCAFLEGERRAPRFAPTAELFRYVQALCNMRLRQETGEETPLSEEQRQAACAVFGSVQSVTYKKLRQVLRLPAGCRFAGLSYGVTEKGNVQDPEKADVVMRTGKCCQGTACLRGILGDAYEALHEQRLDEADAARLAATGALSAPAAALLARGMAGLRLTDALVRIVSELNDLGQIRALLALLPLPAPRIAALSQAAGEGKLGFFQGTARLSLRAMEAILPHMLACGEYAAACELAGFDPRAAQKTDVTDIRNPVVLRVFREVRRQFSAICREFGFLPGRVHVELLREVGKSGEERNRISRGLERRTKEKEAARKAVAQLLGKSPETVSAGEVQRYELWRQQDGKCAYYMLWRHAGGERAYGDAMPQGSIPPDWLADGVNAVQVDHILPRSRTFDNSFHNLCLCCHAANQAKGGRTPWEWLGAAQPQAWHDFEQWVQSLPLKGLKKRNYLLRDLNAEVQGRFHARNLTDSGYVARLTLRWLEEEYARHDVPMQDADGRTRRRFFARPGQVTDFLRRHWGVQALKKIDGQRSGDRHHALDALLVAACSEGMLQRMVRAFQREENGPERLHIPCPWQDFSATVGRALGSVFVSRVERGRTKGPLHEETLRAIREERQPDGETRRVLYERKAVARLTAADLDKIKDAARCPDVVAALRRWLDAGKPGDALPRSAHGDIIRHVRVCAGEFSSGVILQRGSGQAQAKNGGIVRTDIYSRDGKFYMVPVYAKDVADKRLPLRACVAHKDEKDWLELTEDYHFLFSLTPDCYVLTENRKGEVKEGYFEGPDRGSANISLSLAHDKKNTIRGIGIQNLKRFEKYRVDRFGRLSLVRREADPRGRS

SEQ ID NO: 326 - protein, 1073 aa, synthetic construct
  REGION 1..1073: note = MG74-21 effector
MQVRDDVILGLDIGVGSLGWALLEEDLQTGEQRLLQRQTPQGETTYALGVRLFHVPENAKTKELLNVKRRTARMQRRTTARRAQRMRRVRALLDSLGVPGVRDADAFHLGKGRGAQCDPWQLRREGLERRLEAREWAVVLLHIAKHRGFRSNSKTDRSGSDKEMGQVLQAVSNLQQEVEASGLTVGALLASRERRRNRADHTGAPRYDLCMLRSLQENEVDILFTRQRELDNPLAGEEVRCRYAELAFAQRPLAPVSHMVGPCAFLEGERRAPRFAPTAELFRYVQALCNMRLRQETGEETPLSEEQRQAACTVFGSVQSVTYKKLRQVLRLPAGCRFAGLSYGVTEKGNVQDPEKADVVMRTGKCCQGTACLRGILGDAYEALHEQRLDEADAARLAATGALSAPAAALLARGMAGLRLTDAVARIVSELNDLDQIRAVLALLPLAAPRIAALSQAAGEGKLGIFQGTARLSLRAMEAILPHMLACGEYAAACELAGFDPRAAQKTDVTDIRNPVVLRVFREVRRQFSAICREFGFLPGRVHVELLREVGKSGEERNRISRGLERRTKEKEAARKAVAQLLGKSPETVSAGEVQRYELWRQQDGKCAYYMLWRHAGGERAYGDAMPQGSIPPDWLADGVNAVQVDHILPRSRTFDNSFHNLCLCCHAANQAKGGRTPWEWLGAAQPQAWHDFEQWVQSLPLKGLKKRNYLLRDLNAEVQGRFHARNLTDSGYVARLTLRWLEEEYARHDVPMQDADGRTRRRFFARPGQVTDFLRRHWGVQALKKIDGQRSGDRHHALDALLVAACSEGMLQRMVRAFQREENGPERLHIPCPWQDFSATVGRALGSVFVSRVERGRTKGPLHEETLRAIREERQPDGETRRVLYERKAVARLTAADLDKIKDAARCPDVVAALRRWLDAGKPGDALPRSAHGDIIRHVRVCAGEFSSGVVLQRGSGQAQASNGGMVRTDIYSRDGKFYMVPVYAKDVADKRLPLRACVAAKAEKDWREMTADYRFLFSLTPDCYVLTENRKGEVKEGYFAGANRNTSAISLSLAHDKQNVIQHRHHHVKAF

SEQ ID NO: 327 - protein, 1098 aa, synthetic construct
  REGION 1..1098: note = MG74-22 effector
MQVRDDVILGLDIGVGSLGWALLEEDLQTGEQRLLQRQTPQGETTYALGVRLFHVPENAKTKELLNVKRRTARMQRRTTARRAQRMRRVRALLDSLGVPGVRDADAFHLGKGRGAQCDPWQLRREGLERRLEAREWAVVLLHIAKHRGFRSNSKTDRSGSDKEMGQVLQAVSNLQQEVEASGLTVGALLASRERRRNRADHTGAPRYDLCMLRSLQENEVDILFTRQRELGNPLAGEEVRCRYAELAFAQRPLAPVSHMVGPCAFLEGERRAPRFAPTAELFRYVQALCNMRLRQETGEETPLSEEQRQAACAVFGSVQSVTYKKLRQVLRLPAGCRFAGLSYGVAEKGNVQDPEKADVVMRTGKCCQGTACLRGILGDAYEALHEQRLDEADAARLAATGALSAPAAALLARGMAGLRLTDAVARIVSELNDLDQIRAVLALLPLAAPRIAALSQAAGEGKLGIFQGSARLSLRAMEAILPHMLACGEYAAACELAGFDPRAAQKTDVTDIRNPVVLRVFREVRRQFSAICREFGFLPGRVHVELLREVGKSGEERNRISRGLERRTKEKEAARKAVAQLLGKSPETVSAGEVQRYELWRQQDGKCAYYMLWRHAGGERAYGDAMPQGSIPPDWLADGVNAVQVDHILPRSRTFDNSFHNLCLCCHAANQAKGGRTPWEWLGAAQPQAWHDFEQWVQSLPLKGLKKRNYLLRDLNAEVQGRFHARNLTDSGYVARLTLRWLEEEYARHDVPMQDADGRTRRRFFARPGQVTDFLRRHWGVQALKKIDGQRSGDRHHALDALLVAACSEGMLQRMVRAFQREENGPERLHIPCPWQDFSATVGRALGSVFVSRVERGRTKGPLHEETLRAIREERQPDGETRRVLYERKAVARLTAADLDKIKDAARCPDVVAALRRWLDAGKPGDALPRSAHGDIIRHVRVCAGEFSSGVVLQRGSGQAQASNGGMVRTDIYSRDGKFYMVPVYAKDVADKRLPLRACVAAKAEKDWREMTADYRFLFSLTPDCYVLTENRKGEVKEGYFAGANRNTSAISLSLAHDKQNVIQGIGITTLKRFEKYRVDRFGRLSLVRREADPRGRS

SEQ ID NO: 328 - protein, 341 aa, synthetic construct
  REGION 1..341: note = MG74-23 effector
MQVRDDVILGLDIGVGSLGWALLEEDLQTGEQRLLQRQTPQGETTYALGVRLFHVPENAKTKELLNVKRRTARMQRRTTARRAQRMRRVRALLDSLGVPGVRDADAFHLGKGRGAQCDPWQLRREGLERRLEAREWAVVLLHIAKHRGFRSNSKTDRSGSDKEMGQVLQAVSNLQQEVEASGLTVGALLASRERRRNRADHTGAPRYDLCMLRSLQENEVDILFTRQRELGNPLAGEEVRCRYAELAFAQRPLAPVSHMVGPCAFLEGERRAPRFAPTAELFRYVQALCNMRLRQETGEETPLSEEQRQAFSAACSPSPTKNCGRYCACLPVAVLRAFPTV

SEQ ID NO: 329 - protein, 754 aa, synthetic construct
  REGION 1..754: note = MG74-24 effector
MTEKGNVQDPEKADVVMRTGKCCQGTACLRGILGDAYEALHEQRLDEADAARLAATGALSAPAAALLAQGMAGLRLTDAVARIVSELNDLDQIRAVLALLPLAAPRIAALSQAAGEGKLGIFQGSARLSLRAMEAILPHMLACGEYAAACELAGFDPRAAQKTDVTDIRNPVVLRVFREVRRQFSAICREFGFLPGRVHVELLREVGKSGEERNRISRGLERRTKEKEAARKAVAQLLGKSPETVSAGEVQRYELWRQQDGKCAYYMLWRHAGGERAYGDAMPQGSIPPAWLADGVNAVQVDHILPRSRTFDNSFHNLCLCCHAANQAKGGRTPWEWLGAAQPQAWHDFEQWVQSLPLKGLKKRNYLLRDLNAEVQGRFHARNLTDSGYVARLTLRWLEEEYARHDVPMQDADGRTRRRFFARPGQVTDFLRRHWGVQALKKIDGQRSGDRHHALDALLVAACSEGMLQRMVRAFQREENGPERLHIPCPWQDFSATVGRALGSVFVSRVERGRTKGPLHEETLRAIREERQPDGETRRVLYERKAVARLTAADLDKIKDAARCPDVVAALRRWLDAGKPGDALPRSAHGDIIRHVRVCAGEFSSGVVLQRGSGQAQASNGGMVRTDIYSRDGKFYMVPVYAKDVADKRLPLRACVAAKAEKDWREMTADYRFLFSLTPDCYVLTENRKGEVKEGYFAGANRNTSAISLSLAHDKQHVIQGIGITTLKRFEKYRVDRFGRLSLVRREADPRGRS

SEQ ID NO: 330 - protein, 1098 aa, synthetic construct
  REGION 1..1098: note = MG74-25 effector
MQVRDDVILGLDIGVGSLGWALLEEDLQTGEQRLLQRQAPQGETSYALGVRLFNVPENAKTKELLNVKRRTARMQRRTTARRAQRMRRVRALLDSLGVLGVRDADAFHLGKGRGAQCDPWQLRREGLERRLEAREWAVVLLHIAKHRGFRSNSKTDSSGSDKEMGQVLQAVSNLQQEVEASGLTVGALLASRERRRNRADHTGAPRYDLCMLRSLQEDEVNILFTRQRELGNPLAGEDIRCRYAELAFAQRPLAPVSHMVGPCAFLEGERRAPRFAPTAELFRYVQALCTMRLRQETGEETPLSEEQRQAACAVFGSVQSVTYKKLRQVLRLPAGCRFVGLSYGVTEKGKVQDPEKADVVMRTGKCCQGTACLRGILGDAYDALHEQRLDEADAARLAATDALSAPAAALLARGMAGLRLTDALVRIVSELNDLGQIRAILALLPLPAPRIAALSQAAGEGKLGFFQGTARLSLRAMEAILPHMLACGEYAAACELAGFDPRAAQKTDVTDIRNPVVLRVFREVRRQFSAICREFGFLPGRVHMELLREVGKSGEERNRISRGLERRTKEKEAARKAVAQLLGKSPEAVSAGEVQRYELWRQQDGKCAYYMLWRHAGGERAYGNAMPQGSIPPAWLADGVNAVQVDHILPRSRTFDNSFHNLCLCCHAANQAKGGRTPWEWLGAAQPQAWHDFEQWVQSLPLKGLKKRNYLLRDLSAEVQGRFHARNLTDSSYVARLTLRWLEEEYARHDVPMQDAEGRTRRRFFARPGQVTDFLRRHWGVQALKKIDGQRSGDRHHALDALLVAACSEGMLQRMVRAFQREENGPERLHIPCPWQDFSATVGRALGSVFVSRVERGRTKGPLHEETLRAIREERQPDGETRRVLYERKAVARLTAADLDRIKDAARCPDVVAALRRWLDAGKPGDALPRSAHGDIIRHVRVCAGEFSSGVVLQRGSGQAQASNGGMVRTDIYSRDGKFYMVPVYAKDVADRRLPLRACVAAKAEKDWREMTADYRFLFSLTPDCYVLTENRKGEVKEGYFIGSDRSTAAISLSLAHDRQQSLRGIGITTLKRFEKYRVDRFGRLSPVRREADPRGRS

SEQ ID NO: 331 - protein, 1098 aa, synthetic construct
  REGION 1..1098: note = MG74-26 effector
MQVHDDVILGLDIGVGSLGWALLEEDLQTGEQRLLQRQTPQGETTYALGVRLFHVPENAKTKELLNVKRRTARMQRRTTARRAQRMRRVRALLDSLGVPGVRDADAFHLGKGRGAQCDPWQLRREGLERRLEAREWAVVLLHIAKHRGFRSNSKTDRSGSDKEMGQVLQAVSNLQQKVEASGLTVGALLASRERRRNRADHTGAPRYDLCMLRSLQENEVDILFTRQRELGNPLAGEEVRCRYAELAFAQRPLAPVSHMVGPCAFLEGERRAPRFAPTAELFRYVQALCNMRLRQETGEETPLSEEQRQAACAVFGSVQSVTYKKLRQVLRLPAGCRFAGLSYGVTEKGNVQDPEKADVVMRTGKCCQGTACLRGILGDAYEALHEQRLDEADAARLAATGALSAPAAALLARGMAGLRLTDAVARIVSELNDLDQIRAVLALLPLAAPRIAALSQAAGEGKLGIFQGTARLSLRAMEAILPHMLACGEYAAACELAGFDPRAAQKTDVTDIRNPVVLRVFREVRRQFSAICREFGFLPGRVHVELLREVGKSGEERNRISRGLERRTKEKEAARKAVAQLLGKSPETVSAGEVQRYELWRQQDGKCAYYMLWRHAGGERAYGDAMPQGSIPPAWLADGVNAVQVDHILPRSRTFDNSFHNLCLCCHAANQAKGGRTPWEWLGAAQPQAWHDFEQWVQSLPLKGLKKRNYLLRDLNAEVQGRFHARNLTDSGYVARLTLRWLEEEYARHDVPMQDADGRTRRRFFARPGQVTDFLRRHWGVQALKKIDGQRSGDRHHALDALLVAACSEGMLQRMVRAFQREENGPERLHIPCPWQDFSATVGRALGSVFVSRVERGRTKGPLHEETLRAIREERQPDGETRRVLYERKAVARLTAADLDKIKDAARCPDVVAALRRWLDAGKPGDALPRSAHGDIIRHVRVCAGEFSSGVVLQRGSGQAQASNGGMVRTDIYSRDGKFYMVPVYAKDVADKRLPLRACVAAKAEKDWREMTADYRFLFSLTPDCYVLTENRKGEVKEGYFAGANRNTSAISLSLAHDKQNVIQGIGITTLKRFEKYRVDRFGRLSLVRREADPRGRS

SEQ ID NO: 332 - protein, 1098 aa, synthetic construct
  REGION 1..1098: note = MG74-27 effector
MQVRDDVILGLDIGVGSLGWALLEEDLQTGEQRLLQRQAPQGETSYALGVRLFNVPENAKTKELLNVKRRTARMQRRTTARRAQRMRRVRALLDSLGVLGVRDADAFHLGKGRGAQCDPWQLRREGLERRLEAREWAVVLLHIAKHRGFRSNSKTDSSGSDKEMGQVLQAVSNLQQEVEASGLTVGALLASRERRRNRADHTGAPRYDLCMLRSLQEDEVNILFTRQRELGNPLAGEDIRCRYAELAFAQRPLAPVSHMVGPCAFLEGERRAPRFAPTAELFRYVQALCTMRLRQETGEETPLSEEQRQAACAVFGSVQSVTYKKLRQVLRLPAGCRFVGLSYGVTEKGTVQDPEKADVVMRTGKCCQGTACLRGILGDAYDALHEQRLDEADAARLAATDALSAPAAALLARGMAGLRLTDALVRIVSELNDLGQIRAILALLPLPAPRIAALSQAAGEGKLGFFQGTARLSLRAMEAILPHMQACGEYAAACELAGFDPRAAQKTDLTDIRNPVVLRVFREVRRQFSAICREFGFLPGRVHVELLREVGKSGEERNRISRGLERRTKEKEAARKAVAQLLGKSPEAVSAGEVQRYELWRQQDGKCAYYMLWRHAGGERAYGNAMPQGSIPPAWLADGVNAVQVDHILPRSRTFDNSFHNLCLCCHAANQAKGGRTPWEWLGAAQPQAWHDFEQWVQSLPLKGLKKRNYLLRDLSAEVQGRFHARNLTDSSYVARLTLRWLEEEYARHDVPMQDAEGRTRRRFFARPGQVTDFLRRHWGVQALKKIDGQRSGDRHHALDALLVAACSEGMLQRMVRAFQREENGPERLHIPCPWQDFSATVGRALGSVFVSRVERGRTKGPLHEETLRAIREERQPDGETRRVLYERKAVARLTAADLDRIKDAARCPDVVAALRRWLDAGKPGDALPRSAHGDIIRHVRVCAGEFSSGVVLQRGSGQAQASNGGMVRTDIYSRDGKFYMVPVYAKDVADRRLPLRACVAAKAEKDWREMTADYRFLFSLTPDCYVLTENRKGEVKEGYFIGSDRSTAAISLSLAHDRQQSLRGIGITTLKRFEKYRVDRFGRLSSVRREADPRGRS

SEQ ID NO: 333 - protein, 1098 aa, synthetic construct
  REGION 1..1098: note = MG74-28 effector
MQVHDDVILGLDIGVGSLGWALLEEDLQTGEQRLLQRQTPQGETTYALGVRLFHVPENAKTKELLNVKRRTARMQRRTTARRAQRMRRVRALLDSLGVPGVRDADAFHLGKGRGAQCDPWQLRREGLERRLEAREWAVVLLHIAKHRGFRSNSKTDRSGSDKEMGQVLQAVSNLQQEVEASGLTVGALLASRERRRNRADHTGAPRYDLCMLRSLQENEVDILFTRQRELGNPLAGEEVRCRYAELAFAQRPLAPVSHMVGPCAFLEGERRAPRFAPTAELFRYVQALCNMRLRQETGEETPLSEEQRQAACAVFGSVQSVTYKKLRQVLRLPAGCRFAGLSYGVTEKGNVQDPEKADVVMRTGKCCQGTACLRGILGDAYEALHEQRLDEADAARLAATGALSAPAAALLARGMAGLRLTDAVARIVSELNDLDQIRAVLALLPLAAPRIAALAQAAGEGKLGIFQGSARLSLRAMEAILPHMLACGEYAAACELAGFDPRAAQKTDVTDIRNPVVLRVFREVRRQFSAICREFGFLPGRVHVELLREVGKSGEERNRISRGLERRTKEKEAARKAVAQLLGKSPETVSAGEVQRYELWRQQDGKCAYYMLWRHAGGERAYGDAMPQGSIPPVWLADGVNAVQVDHILPRSRTFDNSFHNLCLCCHAANQAKGGRTPWEWLGAAQPQAWHDFEQWVQSLPLKGLKKRNYLLRDLNAEVQGRFHARNLTDSGYVARLTLRWLEEEYARHDVPMQDADGRTRRRFFARPGQVTDFLRRHWGVQALKKIDGQRSGDRHHALDALLVAACSEGMLQRMVRAFQREENGPERLHIPCPWQDFSATVGRALGSVFVSRVERGRTKGPLHEETLRAIREERQPDGETRRVLYERKAVARLTAADLDKIKDAARCPDVVAALRRWLDAGKPGDALPRSAHGDIIRHVRVCAGEFSSGVVLQRGSGQAQASNGGMVRTDIYSRDGKFYMVPVYAKDVADKRLPLRACVAAKAEKDWREMTADYRFLFSLTPDCYVLTENRKGEVKEGYFAGANRNTSAISLSLAHDKQNVIQGIGITTLKRFEKYRVDRFGRLSLVRREADPRGRS

SEQ ID NO: 334 - protein, 590 aa, synthetic construct
  REGION 1..590: note = MG74-29 effector
MTDIRNPVVLRVFREVRRQFSAICREFGFLPGRVHVELLREVGKSGEERNRISRGLERRTKEKEAARKAVAQLLGKSPETVSAGEVQRYELWRQQDGKCAYYMLWRHAGGERAYGDAMPQGSIPPAWLADGVNAVQVDHILPRSRTFDNSFHNLCLCCHAANQAKGGRTPWEWLGAAQPQAWHDFEQWVQSLPLKGLKKRNYLLRDLNAEVQGRFHARNLTDSGYVARLTLRWLEEEYARHDVPMQDADGRTRRRFFARPGQVTDFLRRHWGVQALKKIDGQRSGDRHHALDALLVAACSEGMLQRMVRAFQREENGPERLHIPCPWQDFSATVGRALGSVFVSRVERGRTKGPLHEETLRAIREERQPDGETRRVLYERKAVARLTAADLDKIKDAARCPDVVAALRRWLDAGKPGDALPRSAHGDIIRHVRVCAGEFSSGVVLQRGSGQAQASNGGMVRTDIYSRDGKFYMVPVYAKDVADKRLPLRACVAHKDEKDWPEMTADYRFLFSLTPDCYVLTENRKGEIKEGYFSGADRSSANISLTLAHDRKSSIRGIGIQKLRRFEKYRVDRFGRLSPVRREADPRGRS

SEQ ID NO: 335 - protein, 1098 aa, synthetic construct
  REGION 1..1098: note = MG74-30 effector
MQVHDDVILGLDIGVGSLGWALLEEDLQTGEQRLLQRQTPQGETTYALGVRLFHVPENAKTKELLNVKRRTARMQRRTTARRAQRMRRVRALLDSLGVPGVRDADAFHLGKGRGAQCDPWQLRREGLERRLEAREWAVVLLHIAKHRGFRSNSKTDRSGSDKEMGQVLQAVSNLQQEVEASGLTVGALLASRERRRNRADHTGAPRYDLCMLRSLQENEVDILFTRQRELGNPLAGEEVRCRYAELAFAQRPLAPVSHMVGPCAFLEGERRAPRFAPTAELFRYVQALCNMRLRQETGEETPLSEEQRQAACAVFGSVQSVTYKKLRQVLRLPAGCRFAGLSYGVTEKGNVQDPEKADVVMRTGKCCQGTACLRGILGDAYEALHEQRLDEADAARLAATGALSAPAAALLARGMAGLRLTDAVARIVSELNDLDQIRAVLALLPLAAPRIAALSQAAGEGKLGIFQGSARLSLRAMEAILPHMLACGEYAAACELAGFDPRAAQKTDVTDIRNPVVLRVFREVRRQFSAICREFGFLPGRVHVELLREVGKSGEERNRISRGLERRTKEKEAARKAVAQLLGKSPETVSAGEVQRYELWRQQDGKCAYYMLWRHAGGERAYGDAMPQGSIPPAWLADGVNAVQVDHILPRSRTFDNSFHNLCLCCHAANQAKGGRTPWEWLGAAQPQAWHDFEQWVQSLPLKGLKKRNYLLRDLNAEVQGRFHARNLTDSGYVARLTLRWLEEEYARHDVPMQDADGRTRRRFFARPGQVTDFLRRHWGVQALKKIDGQRSGDRHHALDALLVAACSEGMLQRMVRAFQREENGPERLHIPCPWQDFSATVGRALGSVFVSRVERGRTKGPLHEETLRAIREERQPDGETRRVLYERKAVARLTAADLDKIKDAARCPDVVAALRRWLDAGKPGDALPRSAHGDIIRHVRVCAGEFSSGVVLQRGSGQAQASNGGMVRTDIYSRDGKFYMVPVYAKDVADKRLPLRACVAHKDEKDWPEMTADYRFLFSLTPDCYVLTENRKGEIKEGYFSGADRSSANISLTLAHDRKSSIRGIGIQKLRRFEKYRVDRFGRLSPVRREADPRGRS

SEQ ID NO: 336 - protein, 1098 aa, synthetic construct
  REGION 1..1098: note = MG74-31 effector
MQVHDDVILGLDIGVGSLGWALLEEDLQTGEQRLLQRQTPQGETTYALGVRLFHVPENAKTKELLNVKRRTARMQRRTTARRAQRMRRVRALLDSLGVPGVRDADAFHLGKGRGAQCDPWQLRREGLERRLEAREWAVVLLHIAKHRGFRSNSKTDRSGSDKEMGQVLQAVSNLQQEVEASGLTVGALLASRERRRNRADHTGAPRYDLCMLRSLQENEVDILFTRQRELGNPLAGEEVRCRYAELAFAQRPLAPVSHMVGPCAFLEGERRAPRFAPTAELFRYVQALCNMRLRQETGEETPLSEEQRQAACAVFGSVQSVTYKKLRQVLRLPAGCRFAGLSYGVTEKGNVQDPEKADVVMRTGKCCQGTACLRGILGDAYEALHEQRLDEADAARLAATGALSAPAAALLARGMAGLRLTDAVARIVSELNDLDQIRAVLALLPLAAPRIAALAQAAGEGKLGIFQGSARLSLRAMEAILPHMLACGEYAAACELAGFDPRAAQKTDVTDIRNPVVLRVFREVRRQFSAICREFGFLPGRVHVELLREVGKSGEERNRISRGLERRTKEKEAARKAVAQLLGKSPETVSAGEVQRYELWRQQDGKCAYYMLWRHAGGERAYGDAMPQGSIPPVWLADGVNAVQVDHILPRSRTFDNSFHNLCLCCHAANQAKGGRTPWEWLGAAQPQAWHDFEQWVQSLPLKGLKKRNYLLRDLNAEVQGRFHARNLADSGYVARLTLRWLEEEYARHDVPMQDADGRTRRRFFARPGQVTDFLRRHWGVQALKKIDGQRSGDRHHALDALLVAACSEGMLQRMVRAFQREENGPERLHIPCPWQDFSATVGRALGSVFVSRVERGRTKGPLHEETLRAIREERQPDGETRRVLYERKAVARLTAADLDKIKDAARCPDVVAALRRWLDAGKPGDALPRSAHGDIIRHVRVCAGEFSSGVVLQRGSGQAQASNGGMVRTDIYSRDGKFYMVPVYAKDVADKRLPLRACVAAKAEKDWREMTADYRFLFSLTPDCYVLTENRKGEVKEGYFAGANRNTSAISLSLAHDKQNVIQGIGITTLKRFEKYRVDRFGRLSLVRREADPRGRS

SEQ ID NO: 337 - protein, 1098 aa, synthetic construct
  REGION 1..1098: note = MG74-32 effector
MQVRDDVILGLDIGVGSLGWALLEEDLQTGEQRLLQRQTPQGETTYALGVRLFHVPENAKTKELLNVKRRTARMQRRTTARRAQRMRRVRALLDSLGVPGVRDADAFHLGKGRGAQCDPWQLRREGLERRLEAREWAVVLLHIAKHRGFRSNSKTDRSGSDKEMGQVLQAVSNLQQEVEASGLTVGALLASRERRRNRADHTGAPRYDLCMLRSLQENEVDILFTRQRELGNPLAGEEVRCRYAELAFAQRPLAPVSHMVGPCAFLEGERRAPRFAPTAELFRYVQALCNMRLRQETGEETPLSEEQRQAACTVFGSVQSVTYKKLRQVLRLPAGCRFAGLSYGVTEKGNVQDPEKADVVMRTGKCCQGTACLRGILGDAYEALHEQRLDEADAARLAATGALSAPAAALLARGMAGLRLTDAVARIVSELNDLDQIRAVLALLPLAAPRIAALSQAAGEGKLGIFQGSARLSLRAMEAILPHMLACGEYAAACELAGFDPRAAQKTDVTDIRNPVVLRVFREVRRQFSAICREFGFLPGRVHVELLREVGKSGEERNRISRGLERRTKEKEAARKAVAQLLGKSPETVSAGEVQRYELWRQQDGKCAYYMLWRHAGGERAYGDAMPQGSIPPDWLADGVNAVQVDHILPRSRTFDNSFHNLCLCCHAANQAKGGRTPWEWLGAAQPQAWHDFEQWVQSLPLKGLKKRNYLLRDLNAEVQGRFHARNLTDSGYVARLTLRWQEEEYARHDVPMQDADGRTRRRFFARPGQVTDFLRRHWGVQALKKIDGQRSGDRHHALDALLVAACSEGMLQRMVRAFQREENGPERLHIPCPWQDFSATVGRALGSVFVSRVERGRTKGPLHEETLRAIREERQPDGETRRVLYERKAVARLTAADLDKIKDAARCPDVVAALRRWLDAGKPGDALPRSAHGDIIRHVRVCAGEFSSGVVLQRGSGQAQASNGGMVRTDIYSRDGKFYMVPVYAKDVADKRLPLRACVAAKAEKDWREMTADYRFLFSLTPDCYVLTENRKGEVKEGYFAGANRNTSAISLSLAHDKQNVIQGIGITTLKRFEKYRVDRFGRLSLVRREADPRGRS

SEQ ID NO: 338 - protein, 1098 aa, synthetic construct
  REGION 1..1098: note = MG74-33 effector
MQVRDDVILGLDIGVGSLGWALLEEDLQTGEQRLLQRQTPQGETTYALGVRLFHVPENAKTKELLNVKRRTARMQRRTTARRAQRMRRVRALLDSLGVPGVRDADAFHLGKGRGAQCDPWQLRREGLERRLEAREWAVVLLHIAKHRGFRSNSKTDRSGSDKEIGQVLQAVSNLQQEVEASGLTVGALLASRERRRNRADHTGAPRYDLCMLRSLQENEVDILFTRQRELGNPLAGEEVRCRYAELAFAQRPLAPVSHMVGPCAFLEGERRAPRFAPTAELFRYVQALCNMRLRQETGEETPLSEEQRQAACAVFGSVQSVTYKKLRQVLRLPAGCRFAGLSYGVTEKGNVQDPEKADVVMRTGKCCQGTACLRGILGDAYEALHEQRLDEADAARLAATGALSAPAAALLAQGMAGLRLTDAVARIVSELNDLDQIRAVLALLPLAAPRIAALSQAAGEGKLGIFQGSARLSLRAMEAILPHMLACGEYAAACELAGFDPRAAQKTDVTDIRNPVVLRVFREVRRQFSAICREFGFLPGRVHVELLREVGKSGEERNRISRGLERRTKEKEAARKAVAQLLGKSPETVSAGEVQRYELWRQQDGKCAYYMLWRHAGGERAYGDAMPQGSIPPAWLADGVNAVQVDHILPRSRTFDNSFHNLCLCCHAANQAKGGRTPWEWLGAAQPQAWHDFEQWVQSLPLKGLKKRNYLLRDLNAEVQGRFHARNLTDSGYVARLTLRWLEEEYARHDVPMQDADGRTRRRFFARPGQVTDFLRRHWGVQALKKIDGQRSGDRHHALDALLVAACSEGMLQRMVRAFQREENGPERLHIPCPWQDFSATVGRALGSVFVSRVERGRTKGPLHEETLRAIREERQPDGETRRVLYERKAVARLTAADLDKIKDAARCPDVVAALRRWLDAGKPGDALPRSAHGDIIRHVRVCAGEFSSGVVLQRGSGQAQASNGGMVRTDIYSRDGKFYMVPVYAKDVADKRLPLRACVAAKAEKDWREMTADYRFLFSLTPDCYVLTENRKGEVKEGYFAGANRNTSAISLSLAHDKQHVIQGIGITTLKRFEKYRVDRFGRLSLVRREADPRGRS

SEQ ID NO: 339 - protein, 1098 aa, synthetic construct
  REGION 1..1098: note = MG74-34 effector
MQVRDDVILGLDIGVGSLGWALLEEDLQTGEQRLLQRQTSQGETTYALGVRLFHVPENAKTKELLNVKRRTARMQRRTTARRAQRMRRVRALLDSLGVPGVRDADAFHLGKGRGAQCDPWQLRREGLERRLEAREWAVVLLHIAKHRGFRSNSKTDRSGSDKEMGQVLQAVSNLQQEVEASGLTVGALLASRERRRNRADHTGAPRYDLCMLRSLQENEVDILFTRQRELGNPLAGEEVRCRYAELAFAQRPLAPVSHMVGPCAFLEGERRAPRFAPTAELFRYVQALCNMRLRQETGEETPLSEEQRQAACTVFGSVQSVTYKKLRQVLRLPAGCRFAGLSYGVTEKGNVQDPEKADVVMRTGKCCQGTACLRGILGDAYEALHEQRLDEADAARLAATGALSAPAAALLARGMAGLRLTDAVARIVSELNDLDQIRAVLALLPLAAPRIAALSQAAGEGKLGIFQGTARLSLRAMEAILPHMLACGEYAAACELAGFDPRAAQKTDVTDIRNPVVLRVFREVRRQFSAICREFGFLPGRVHVELLREVGKSGEERNRISRGLERRTKEKEAARKAVAQLLGKSPEAVSAGEVQRYELWRQQDGKCAYYMLWRHAGGERAYGNAMPQGSIPPAWLADGVNAVQVDHILPRSRTFDNSFHNLCLCCHAANQAKGGRTPWEWLGAAQPQAWHDFEQWVQSLPLKGLKKRNYLLRDLSAEVQGRFHARNLTDSSYVARLTLRWLEEEYARHDVPMQDAEGRTRRRFFARPGQVTDFLRRHWGVQALKKIDGQRSGDRHHALDALLVAACSEGMLQRMVRAFQREENGPERLHIPCPWQDFSTTVGRALGSVFVSRVERGRTKGPLHEETLRAIREERQPDGETRRVLYERKAVARLTAADLDRIKDAARCPDVVAALRRWLDAGKPGDDLPRSAHGDIIRHVRVRAGEFSSGVILQRGSGQAQAKNGGIVRTDIYSRDGKFYMVPVYAKDVADKRLPLRACVAHKDEKDWLELTEDYHFLFSLTPDCYVLTENRKGEVKEGYFEGPDRGSANISLSLAHDKKNTIRGIGIQNLKRFEKYRVDRFGRLSLVRREADPRGRS

SEQ ID NO: 340 - protein, 1010 aa, synthetic construct
  REGION 1..1010: note = MG74-35 effector
MGALLDSLGVPGVRDADAFHLGKGRGAQCDPWQLRREGLERRLEAREWAVVLLHIAKHRGFRSNSKTDRSGSDKEMGQVLQAVSNLQQEVEASGLTVGALLASRERRRNRADHTGAPRYDLCMLRSLQENEVDILFTRQRELGNPLAGEEVRCRYAELAFAQRPLAPVSHMVGPCAFLEGERRAPRFAPTAELFRYVQTLCNMRLRQETGEETPLSEEQRQAACAVFGSVQSVTYKKLRQVLRLPAGCRFAGLSYGVTEKGNVQDPEKADVVMRTGKCCQGTACLRGILGDAYEALHEQRLDEADAARLAATGALSAPAAALLARGMAGLRLTDALVRIVSELNDLGQIRALLALLPLPAPRIAALSQAAGEGKLGFFQGTARLSLRAMEAILPHMLACGEYAAACELAGFDPRAAQKTDVTDIRNPVVLRVFREVRRQFSAICREFGFLPGRVHVELLREVGKSGEERNRISRGLERRTKEKEAARKAVAQLLGKSPETVSAGEVQRYELWRQQDGKCAYYMLWRHAGGERAYGDAMPQGSIPPDWLADGVNAVQVDHILPRSRTFDNSFHNLCLCCHAANQAKGGRTPWEWLGAAQPQAWHDFEQWVQSLPLKGLKKRNYLLRDLNAEVQGRFHARNLTDSGYVARLTLRWLEEEYARHDVPMQDADGRTRRRFFARPGQVTDFLRRHWGVQALKKIDGQRSGDRHHALDALLVAACSEGMLQRMVRAFQREENGPERLHIPCPWQDFSATVGRALGSVFVSRVERGRTKGPLHEETLRAIREERQPDGETRRVLYERKAVARLTAADLDKIKDAARCPDVVAALRRWLDAGKPGDALPRSAHGDIIRHVRVCAGEFSSGVILQRGSGQAQAKNGGIVRTDIYSRDGKFYMVPVYAKDVADKRLPLRACVAHKDEKDWLELTEDYHFLFSLTPDCYVLTENRKGEVKEGYFEGLDRGSANISLSLAHDKKNTIRGIGIQNLKRFEKYRVDRFGRLSLVRREADPRGRS

SEQ ID NO: 341 - protein, 1098 aa, synthetic construct
  REGION 1..1098: note = MG74-36 effector
MQVRDDVILGLDIGVGSLGWALLEEDLQTGEQRLLQRQTSQGETTYALGVRLFHVPENAKTKELLNVKRRTARMQRRTTARRAQRMRRVRALLDSLGVPGVRDADAFHLGKGRGAQCDPWQLRREGLERRLEAREWAVVLLHIAKHRGFRSNSKTDRSGSDKEMGQVLQAVSNLQQEVEASGLTVGALLASRERRRNRADHTGAPRYDLCMLRSLQENEVDILFTRQRELGNPLAGEEVRCRYAELAFAQRPLAPVSHMVGPCAFLEGERRAPRFAPTAELFRYVQALCNMRLRQETGEETPLSEEQRQAACAVFGSVQSVTYKKLRQVLRLPAGCRFAGLSYGVTEKGNVQDPEKADVVMRTGKCCQGTACLRGILGDAYEALHEQRLDEADAARLAATGALSAPAAALLARGMAGLRLTDAVARIVSELNDLDQIRAVLALLPLAAPRIAALSQAAGEGKLGIFQGSARLSLRAMEAILPHMLACGEYAAACELAGFDPRAAQKTDVTDIRNPVVLRVFREVRRQFSAICREFGFLPGRVHVELLREVGKSGEERNRISRGLERRTKEKEAARKAVAQLLGKSPETVSAGEVQRYELWRQQDGKCAYYMLWRHAGGERAYGDAMPQGSIPPAWLADGVNAVQVDHILPRSRTFDNSFHNLCLCCHAANQAKGGRTPWEWLGAAQPQAWHDFEQWVQSLPLKGLKKRNYLLRDLNAEVQGRFHARNLTDSGYVARLTLRWLEEEYARHDVPMQDADGRTRRRFFARPGQVTDFLRRHWGVQALKKIDGQRSGDRHHALDALLVAACSEGMLQRMVRAFQREENGPERLHIPCPWQDFSATVGRALGSVFVSRVERGRTKGPLHEETLRAIREERQPDGETRRVLYERKAVARLTAADLDKIKDAARCPDVVAALRRWLNAGKPGDALPRSAHGDIIRHVRVCAGEFSSGVVLQRGSGQAQASNGGMVRTDIYSRDGKFYMVPVYAKDVADKRLPLRACVAAKAEKDWREMTADYRFLFSLTPDCYVLTENRKGEVKEGYFAGANRNTSAISLSLAHDKQNVIQGIGITTLKRFEKYRVDRFGRLSLVRREADPRGRS

SEQ ID NO: 342 - protein, 1098 aa, synthetic construct
  REGION 1..1098: note = MG74-37 effector
MQVRDDVILGLDIGVGSLGWALLEEDLQTGEQRLLQRQTPQGETTYALGVRLFHVPENAKTKELLNVKRRTARMQRRTTARRAQRMRRVRALLDSLGVPGVRDADAFHLGKGRGAQCDPWQLRREGLERRLEAREWAVVLLHIAKHRGFRSNSKTDRSGSDKEMGQVLQAVSNLQQEVEASGLTVGALLASRERRRNRADHTGAPRYDLCMLRSLQENEVDILFTRQRELGNPLAGEEVRCRYAELAFAQRPLAPVSHMVGPCAFLEGERRAPRFAPTAELFRYVQALCNMRLRQETGEETPLSEEQRQAACAVFGSVQSVTYKKLRQVLRLPAGCRFAGLSYGVTEKGNVQDPEKADVVMRTGKCCQGTACLRGILGDAYEALHEQRLDEADAARLAATGALSAPAAALLARGMAGLRLTDAVARIVSELNDLDQIRAVLALLPLAAPRIAALSQAAGEGKLGIFQGSARLSLRAMEAILPHMLACGEYAAACELAGFDPRAAQKTDVTDIRNPVVLRVFREVRRQFSAICREFGFLPGRVHVELLREVGKSGEERNRISRGLERRTKEKEAARKAVAQLLGKSPETVSAGEVQRYELWRQQDGKCAYYMLWRHAGGERAYGDAMPQGSIPPDWLADGVNAVQVDHILPRSRTFDNSFHNLCLCCHAANQAKGGRTPWEWLGAAQPQAWHDFEQWVQSLPLKGLKKRNYLLRDLNAEVQGRFHARNLTDSGYVARLTLRWLEEEYARHDVPMQDADGRTRRRFFARPGQVTDFLRRHWGVQALKKIDGQRSGDRHHALDALLVAACSEGMLQRMVRAFQREENGPERLHIPCPWQDFSATVGRALGSVFVSRVERGRTKGPLHEETLRAIREERQPDGETRRVLYERKAVARLTAADLDKIKDAARCPDVVAALRRWLDAGKPGDALPRSAHGDIIRHVRVCAGEFSSGVVLQRGSGQAQASNGGMVRTDIYSRDGKFYMVPVYAKDVADKRLPLRACVAAKAEKDWREMTADYRFLFSLTPDCYVLTENRKGEVKKGYFAGANRNTSAISLSLAHDKQNVIQGIGITTLKRFEKYRVDRFGRLSLVRREADPRGRS

SEQ ID NO: 343 - protein, 1098 aa, synthetic construct
  REGION 1..1098: note = MG74-38 effector
MQVRDDVILGLDIGVGSLGWALLEEDLQTGEQRLLQRQTPQGETTYALGVRLFHVPENAKTKELLNVKRRTARMQRRTTARRAQRMRRVRALLDSLGVPGVRDADAFHLGKGRGAQCDPWQLRREGLERRLEAREWAVVLLHIAKHRGFRSNSKTDRSGSDKEMGQVLQAVSNLQQEVEASGLTVGALLASRERRRNRADHTGAPRYDLCMLRSLQENEVDILFTRQRELGNPLAGEEVRCRYAELAFAQRPLAPVSHMVGPCAFLEGERRAPRFAPTAELFRYVQALCNMRLRQETGEETPLSEEQRQAACAVFGSVQSVTYKKLRQVLRLPAGCRFAGLSYGVTEKGNVQDPEKADVVMRTGKCCQGTACLRGILGDAYEALHEQRLDEADAARLAATGALSAPAAALLARGMAGLRLTDAVARIVSELNDLDQIRAVLALLPLAAPRIAALAQAAGEGKLGIFQGSARLSLRAMEAILPHMLACGEYAAACELAGFDPRAAQKTDVTDIRNPVVLRVFREVRRQFSAICREFGFLPGRVHVELLREVGKSGEERNRISRGLERRTKEKEAARKAVAQLLGKSPETVSAGEVQRYELWRQQDGKCAYYMLWRHAGGERAYGDAMPQGSIPPDWLADGVNAVQVDHILPRSRTFDNSFHNLCLCCHAANQAKGGRTPWEWLGAAQPQAWHDFEQWVQSLPLKGLKKRNYLLRDLNAEVQGRFHARNLTDSGYVARLTLRWLEEEYARHDVPMQDADGRTRRRFFARPGQVTDFLRRHWGVQALKKIDGQRSGDRHHALDALLVAACSEGMLQRMVRAFQREENGPERLHIPCPWQDFSATVGRALGSVFVSRVERGRTKGPLHEETLRAIREERQPDGETRRVLYERKAVARLTAADLDKIKDAARCPDVVAALRRWLDAGKPGDDLPRSAHGDIIRHVRVRAGEFSSGVILQRGSGQAQAKNGGIVRTDIYSRDGKFYMVPVYAKDVADKRLPLRACVAHKDEKDWLELTEDYHFLFSLTPDCYVLTENRKGEVKEGYFEGPDRGSANISLSLAHDKKNTIRGIGIQNLKRFEKYRVDRFGRLSLVRREADPRGRS

SEQ ID NO: 344 - protein, 1098 aa, synthetic construct
  REGION 1..1098: note = MG74-39 effector
MQVHDDVILGLDIGVGSLGWALLEEDLQTGEQRLLQRQTPQGETTYALGVRLFHVPENAKTKELLNVKRRTARMQRRTTARRAQRMRRVRALLDSLGVPGVRDADAFHLGKGRGAQCDPWQLRREGLERRLEAREWAVVLLHIAKHRGFRSNSKTDRSGSDKEMGQVLQAVSNLQQEVEASGLTVGALLASRERRRNRADHTGAPRYDLCMLRSLQENEVDILFTRQRELGNPLAGEEVRCRYAELAFAQRPLAPVSHMVGPCAFLEGERRAPRFAPTAELFRYVQALCNMRLRQETGEETPLSEEQRQAACAVFGSVQSVTYKKLRQVLRLPAGCRFAGLSYGVTEKGNVQDPEKADVVMRTGKCCQGTACLRGILGDAYEALHEQRLDEADAARLAATGALSAPAAALLARGMAGLRLTDAVARIVSELNDLDQIRAVLALLPLAAPRIAALSQAAGEGKLGIFQGSARLSLRAMEAILPHMLACGEYAAACELAGFDPRAAQKTDVTDIRNPVVLRVFREVRRQLSAICREFGFLPGRVHVELLREVGKSGEERNRISRGLERRTKEKEAARKAVAQLLGKSPETVSAGEVQRYELWRQQDGKCAYYMLWRHAGGERAYGDAMPQGSIPPAWLADGVNAVQVDHILPRSRTFDNSFHNLCLCCHAANQAKGGRTPWEWLGAAQPQAWHDFEQWVQSLPLKGLKKRNYLLRDLNAEVQGRFHARNLTDSGYVARLTLRWLEEEYARHDVPMQDADGRTRRRFFARPGQVTDFLRRHWGVQALKKIDGQRSGDRHHALDALLVAACSEGMLQRMVRAFQREENGPERLHIPCPWQDFSATVGRALGSVFVSRVERGRTKGPLHEETLRAIREERQPDGETRRVLYERKAVARLTAADLDKIKDAARCPDVVAALRRWLDAGKPGDALPRSAHGDIIRHVRVCAGEFSSGVVLQRGSGQAQASNGGMVRTDIYSRDGKFYMVPVYAKDVADKRLPLRACVAHKDEKDWPEMTADYRFLFSLTPDCYVLTENRKGEIKEGYFSGADRSSANISLTLAHDRKSSIRGIGIQKLRRFEKYRVDRFGRLSPVRREADPRGRS

SEQ ID NO: 345 - protein, 1098 aa, synthetic construct
  REGION 1..1098: note = MG74-40 effector
MQVRDDVILGLDIGVGSLGWALLEEDLQTGEQRLLQRQAPQGETSYALGVRLFNVPENPKTKELLNVKRRTARMQRRTTARRAQRMRRVRALLDSLGVPGVRDADAFHLGKGRGAQYDPWQLRREGLERRLEAREWAVVLLHIAKHRGFRSNSKTDSSGSDKEMGQVLQAVSNLQQEVEASGLTVGALLASRERRRNRADHTGAPRYDLCMLRSLQEDEVNILFTRQRELGNPLAGEDIRCRYAELAFAQRPLAPVSHMVGPCAFLEGERRAPRFAPTAELFRYVQALCTMRLRQETGEETPLSEEQRQAACAVFGSVQSVTYKKLRQVLRLPAGCRFVGLSYGVTGKGKVQDPEKADVVMRTGKCCQGTACLRGILGDAYDALHEQRLDEADAARLAATDALSAPAAALLARGMAGLRLTDALVRIVSELNDLGQIRAILALLPLPAPRIAALSQAAGEGKLGFFQGTARLSLRAMEAILPHMLACGEYAAACELAGFDPRAAQKTDVTDIRNPVVLRVFREVRRQFSAICREFGFLPGRVHVELLREVGKSGEERNRISRGLERRTKEKEAARKAVAQLLGKSPEAVSAGEVQRYELWRQQDGKCAYYMLWRHAGGERAYGNAMPQGSIPPAWLADGVNAVQVDHILPRSRTFDNSFHNLCLCCHAANQAKGGRTPWEWLGAAQPQAWHDFEQWVQSLPLKGLKKRNYLLRDLSAEVQGRFHARNLTDSSYVARLTLRWLEEEYARHDVPMQDAEGRTRRRFFARPGQVTDFLRRHWGVQALKKIDGQRSGDRHHALDALLVAACSEGMLQRMVRAFQREENGPERLHIPCPWQDFSATVGRALGSVFVSRVERGRTKGPLHEETLRAIREERQPDGETRRVLYERKAVARLTAADLDRIKDAARCPDVVAALRRWLDAGKPGDDLPRSAHGDIIRHVRVRAGEFSSGVILQRGSGQAQAKNGGIVRTDIYSRDGKFYMVPVYAKDVADKRLPLRACVAHKDEKDWLELTEDYHFLFSLTPDCYVLTENRKGEVKEGYFEGPDRGSANISLSLAHDKKNTIRGIGIQNLKRFEKYRVDRFGRLSLVRREADPRGRP

SEQ ID NO: 346 - protein, 1098 aa, synthetic construct
  REGION 1..1098: note = MG74-41 effector
MQVRDDVILGLDIGVGSLGWALLEEDLQTGEQRLLQRQAPQGETSYALGVRLFNVPENPKTKELLNVKRRTARMQRRTTARRAQRMRRVRALLDSLGVLGVRDADAFHLGKGRGAQCDPWQLRREGLERRLEAREWAVVLLHIAKHRGFRSNSKTDSSGSDKEMGQVLQAVSNLQQEVEASGLTVGALLASRERRRNRADHTGAPRYDLCMLRSLQEDEVNILFTRQRELGNPLAGEDIRCRYAELAFAQRPLAPVSHMVGPCAFLEGERRAPRFAPTAELFRYVQALCTMRLRQETGEETPLSEEQRQAACAVFGSVQSVTYKKLRQVLRLPAGCRFVGLSYGVTEKGKVQDPEKADVVMRTGKCCQGTACLRGILGDAYDALHEQRLDEADAARLAATDALSAPAAALLARGMAGLRLTDALVRIVSELNDLGQIRAILALLPLPAPRIAALSQAAGEGKLGFFQGTARLSLRAMEAILPHMQACGEYAAACELAGFDPRAAQKTDLTDIRNPVVLRVFREVRRQFSAICREFGFLPGRVHVELLREVGKSGEERNRISRGLERRTKEKEAARKAVAQLLGKSPEAVSAGEVQRYELWRQQDGKCAYYMLWRHAGGERAYGNAMPQGSIPPAWLADGVNAVQVDHILPRSRTFDNSFHNLCLCCHAANQAKGGRTPWEWLGAAQPQAWHDFEQWVQSLPLKGLKKRNYLLRDLSAEVQGRFHARNLTDSSYVARLTLRWLEEEYARHDVPMQDAEGRTRRRFFARPGQVTDFLRRHWGVQALKKIDGQRSGDRHHALDALLVAACSEGMLQRMVRAFQREENGPERLHIPCPWQDFSTTVGRALGSVFVSRVERGRTKGPLHEETLRAIREERQPDGETRRVLYERKAVARLTVADLDRIKDAARCPDVVAALRRWLDAGKPGDDLPRSAHGDIIRHVRVRAGEFSSGVILQRGSGQAQAKNGGIVRTDIYSRDGKFYMVPVYAKDVADKRLPLRACVAHKDEKDWLELTEDYHFLFSLTPDCYVLTENRKGEVKEGYFEGPDRGSANISLSLAHDKKNTIRGIGIQNLKRFEKYRVDRFGRLSLVRREADPRGRP

SEQ ID NO: 347 - protein, 1098 aa, synthetic construct
  REGION 1..1098: note = MG74-42 effector
MQVHDDVILGLDIGVGSLGWALLEEDLQTGEQRLLQRQTPQGETTYALGVRLFHVPENAKTKELLNVKRRTARMQRRTTARRAQRMRRVRALLDSLGVPGVRDADAFHLGKGRGAQCDPWQLRREGLERRLEAREWAVVLLHIAKHRGFRSNSKTDRSGSDKEMGQVLQAVSNLQQEVEASGLTVGALLASRERRRNRADHTGAPRYDLCMLRSLQENEVDILFTRQRELGNPLAGEEVRCRYAELAFAQRPLAPVSHMVGPCAFLEGERRAPRFAPTAELFRYVQALCNMRLRQETGEETPLSEEQRQAACAVFGSVQSVTYKKLRQVLRLPAGCRFAGLSYGVTEKGNVQDPEKADVVMRTGKCCQGTACLRGILGDAYEALHEQRLDEADAARLAATGALSAPAAALLARGMAGLRLTDAVARIVSELNDLDQIRAVLALLPLAAPRIAALSQAAGEGKLGIFQGSARLSLRAMEAILPHMLACGEYAAACELAGFDPRAAQKTDVTDIRNPVVLRVFREVRRQFSAICREFGFLPGRVHVELLREVGKSGEERNRISRGLERRTKEKEAARKAVAQLLGKSPETVSAGEVQRYELWRQQDGKCAYYMLWRHAGGERAYGDAMPQGSIPPDWLADGVNAVQVDHILPRSRTFDNSFHNLCLCCHAANQAKGGRTPWEWLGAAQPQAWHDFEQWVQSLPLKGLKKRNYLLRDLNAEVQGRFHARNLTDSGYVARLTLRWLEEEYARHDVPMQDADGRTRRRFFARPGQVTDFLRRHWGVQALKKIDGQRSGDRHHALDALLVAACSEGMLQRMVRAFQREENGPERLHIPCPWQDFSATVGRALGSVFVSRVERGRTKGPLHEETLRAIREERQPDGETRRVLYERKAVARLTAADLDKIKDAARCPDVVAALRRWLDAGKPGDALPRSAHGDIIRHVRVCAGEFSSGVVLQRGSGQAQASNGGMVRTDIYSRDGKFYMVPVYAKDVADKRLPLRACVAHKDEKDWPEMTADYRFLFSLTPDCYVLTENRKGEIKEGYFSGADRSSANISLTLAHDRKSSIRGIGIQKLRRFEKYRVDRFGRLSPVRREADPRGRS

SEQ ID NO: 348 - protein, 1098 aa, synthetic construct
  REGION 1..1098: note = MG74-43 effector
MQVHDDVILGLDIGVGSLGWALLEEDLQTGEQRLLQRQTPQGETTYALGVRLFHVPENAKTKELLNVKRRTARMQRRTTARRAQRMRRVRALLDSLGVPGVRDADAFHLGKGRGAQCDPWQLRREGLERRLEAREWAVVLLHIAKHRGFRSNSKTDRSGSDKEMGQVLQAVSNLQQEVEASGLTVGALLASRERRRNRADHTGAPRYDLCMLRSLQENEVDILFTRQRELGNPLAGEEVRCRYAELAFAQRPLAPVSHMVGPCAFLEGERRAPRFAPTAELFRYVQALCNMRLRQETGEETPLSEEQRQAACAVFGSVQSVTYKKLRQVLRLPAGCRFAGLSYGVTEKGNVQDPEKADVVMRTGKCCQGTACLRGILGDAYEALHEQRLDEADAARLAATGALSAPAAALLARGMAGLRLTDAVARIVSELNDLDQIRAVLALLPLAAPRIAALSQAAGEGKLGIFQGTARLSLRAMEAILPHMLACGEYAAACELAGFDPRAAQKTDVTDIRNPVVLRVFREVRRQFSAICREFGFLPGRVHVELLREVGKSGEERNRISRGLERRTKEKEAARKAVAQLLGKSPETVSAGEVQRYELWRQQDGKCAYYMLWRHAGGERAYGDAMPQGSIPPDWLADGVNAVQVDHILPRSRTFDNSFHNLCLCCHAANQAKGGRTPWEWLGAAQPQAWHDFEQWVQSLPLKGLKKRNYLLRDLNAEVQGRFHARNLTDSGYVARLTLRWLEEEYARHDVPMQDADGRTRRRFFARPGQVTDFLRRHWGVQALKKIDGQRSGDRHHALDALLVAACSEGMLQRMVRAFQREENGPERLHIPCPWQDFSATVGRALGSVFVSRVERGRTKGPLHEETLRAIREERQPDGETRRVLYERKAVARLTAADLDKIKDAARCPDVVAALRRWLDAGKPGDALPRSAHGDIIRHVRVCAGEFSSGVILQRGSGQAQAKNGGIVRTDIYSRDGKFYMVPVYAKDVADKRLPLRACVAHKDEKDWLELTEDYHFLFSLTPDCYVLTENRKGEVKEGYFEGPDRGSANISLSLAHDKKNTIRGIGIQNLKRFEKYRVDRFGRLSLVRREADPRGRS

SEQ ID NO: 349 - protein, 1098 aa, synthetic construct
  REGION 1..1098: note = MG74-44 effector
MQVHDDVILGLDIGVGSLGWALLEEDLQTGEQRLLQRQTPQGETTYALGVRLFHVPENAKTKELLNVKRRTARMQRRTTARRAQRMRRVRALLDSLGVPGVRDADAFHLGKGRGAQCDPWQLRREGLERRLEAREWAVVLLHIAKHRGFRSNSKTDRSGSDKEMGQVLQAVSNLQQEVEASGLTVGALLASRERRRNRADHTGAPRYDLCMLRSLQENEVDILFTRQRELGNPLAGEEVRCRYAELAFAQRPLAPVSHMVGPCAFLEGERRAPRFAPTAELFRYVQALCNMRLRQETGEETPLSEEQRQAACAVFGSVQSVTYKKLRQVLRLPAGCRFAGLSYGVTEKGNVQDPEKADVVMRTGKCCQGTACLRGILGDAYEALHEQRLDEADAARLAATGALSAPAAALLARGMAGLRLTDAVARIVSELNDLDQIRAVLALLPLAAPRIAALSQAAGEGKLGIFQGSARLSLRAMEAILPHMLACGEYAAACELAGFDPRAAQKTDVTDIRNPVVLRVFREVRRQFSAICREFGFLPGRVHVELLREVGKSGEERNRISRGLERRTKEKEAARKAVAQLLGKSPETVSAGEVQRYELWRQQDGKCAYYMLWRHAGGERAYGDAMPQGSIPPAWLADGVNAVQVDHILPRSRTFDNSFHNLCLCCHAANQAKGGRTPWEWLGAAQPQAWHDFEQWVQSLPLKGLKKRNYLLRDLNAEVQGRFHARNLTDSGYVARLTLRWLEEEYARHDVPMQDADGRTRRRFFARPGQVTDFLRRHWGVQALKKIDGQRSGDRHHALDALLVAACSEGMLQRMVRAFQREENGPERLHIPCPWQDFSATVGRALGSVFVSRVERGRTKGPLHEETLRAIREERQPDGETRRVLYERKAVARLTAADLDKIKDAARCPDVVAALRRWLDAGKPGDALPRSAHGDIIRHVRVCAGEFSSGVILQRGSGQAQAKNGGIVRTDIYSRDGKFYMVPVYAKDVADKRLPLRACVAHKDEKDWLELTEDYHFLFSLTPDCYVLTENRKGEVKEGYFEGPDRGSANISLSLAHDKKNTIRGIGIQNLKRFEKYRVDRFGRLSLVRREADPRGRS

SEQ ID NO: 350 - protein, 1098 aa, synthetic construct
  REGION 1..1098: note = MG74-45 effector
MQVHDDVILGLDIGVGSLGWALLEEDLQTGEQRLLQRQTPQGETTYALGVRLFHVPENAKTKELLNVKRRTARMQRRTTARRAQRMRRVRALLDSLGVPGVRDADAFHLGKGRGAQCDPWQLRREGLERRLEAREWAVVLLHIAKHRGFRSNSKTDRSGSDKEMGQVLQAVSNLQQEVEASGLTVGALLASRERRRNRADHTGAPRYDLCMLRSLQENEVDILFTRQRELGNPLAGEEVRCRYAELAFAQRPLAPVSHMVGPCAFLEGERRAPRFAPTAELFRYVQALCNMRLRQETGEETPLSEEQRQAACAVFGSVQSVTYKKLRQVLRLPAGCRFAGLSYGVTEKGNVQDPEKADVVMRTGKCCQGTACLRGILGDAYEALHEQRLDEADAARLAATGALSAPAAALLARGMAGLRLTDAVARIVSELNDLDQIRAVLALLPLAAPRIAALSQAAGEGKLGIFQGTARLSLRAMEAILPHMLACGEYAAACELAGFDPRAAQKTDVTDIRNPVVLRVFREVRRQFSAICREFGFLPGRVHVELLREVGKSGEERNRISRGLERRTKEKEAARKAVAQLLGKSPETVSAGEVQRYELWRQQDGKCAYYMLWRHAGGERAYGDAMPQGSIPPAWLADGVNAVQVDHILPRSRTFDNSFHNLCLCCHAANQAKGGRTPWEWLGAAQPQAWHDFEQWVQSLPLKGLKKRNYLLRDLNAEVQGRFHARNLTDSGYVARLTLRWLEEEYARHDVPMQDADGRTRRRFFARPGQVTDFLRRHWGVQALKKIDGQRSGDRHHALDALLVAACSEGMLQRMVRAFQREENGPERLHIPCPWQDFSATVGRALGSVFVSRVERGRTKGPLHEETLRAIREERQPDGETRRVLYERKAVARLTAADLDKIKDAARCPDVVAALRRWLDAGKPGDALPRSAHGDIIRHVRVCAGEFSSGVILQRGSGQAQAKNGGIVRTDIYSRDGKFYMVPVYAKDVADKRLPLRACVAHKDEKDWLELTEDYHFLFSLTPDCYVLTENRKGEVKEGYFEGPDRGSANISLSLAHDKKNTIRGIGIQNLKRFEKYRVDRFGRLSLVRREADPRGRS

SEQ ID NO: 351 - protein, 1098 aa, synthetic construct
  REGION 1..1098: note = MG74-46 effector
MQVRDDVILGLDIGVGSLGWALLEEDLQTGEQRLLQRQTPQGETTYALGVRLFHVPENAKTKELLNVKRRTARMQRRTTARRAQRMRRVRALLDSLGVPGVRDADAFHLGKGWGAQCDPWQLRREGLERRLEAREWAVVLLHIAKHRGFRSNSKTDRSGSDKEMGQVLQAVSNLQQEVEASGLTVGALLASRERRRNRADHTGAPRYDLCMLRSLQENEVDILFTRQRELGNPLAGEEVRCRYAELAFAQRPLAPVSHMVGPCAFLEGERRAPRFAPTAELFRYVQALCNMRLRQETGEETPLSEEQRQAACAVFGSVQSVTYKKLRQVLRLPAGCRFAGLSYGVTEKGNVQDPEKADVAMRTGKCCQGTACLRGILGDAYEALHEQRLDEADAARLAATGALSAPAAALLARGMAGLRLTDALVRIVSELNDLGQIRALLALLPLPAPRIAALSQAAGEGKLGIFQGSARLSLRAMEAILPHMLACGEYAAACELAGFDPRAAQKADVTDIRNPVVLRVFREVRRQFSAICREFGFLPGRVHVELLREVGKSGEERNRISRGLERRTKEKEAARKAVAQLLGKSPETVSAGEVQRYELWRQQDGKCAYYMLWRHAGGERAYGDAMPQGSIPPAWLADGVNAVQVDHILPRSRTFDNSFHNLCLCCHAANQAKGGRTPWEWLGAAQPQAWHDFEQWVQSLPLKGLKKRNYLLRDLNAEVQGRFHARNLTDSGYVARLTLRWLEEEYARHDVPMQDADGRTRRRFFARPGQVTDFLRRHWGVQALKKIDGQRSGDRHHALDALLVAACSEGMLQRMVRAFQREENGPERLHIPCPWQDFSATVGRALGSVFVSRVERGRTKGPLHEETLRAIREERQPDGETRRVLYERKAVARLTAADLDKIKDAARCPDVVAALRRWLDAGKPGDALPRSAHGDIIRHVRVCAGEFSSGVVLQRGSGQAQASNGGMVRTDIYSRDGKFYMVPVYAKDVADKRLPLRACVAHKDEKDWREMTADYRFLFSLTPDCYVLTENRKGEVKEGYFAGANRNTSAISLSLAHDKQNVIQGIGITTLTRFEKYRVDRFGRLSPVRREADPRGRS

SEQ ID NO: 352 - protein, 295 aa, synthetic construct
  REGION 1..295: note = MG74-47 effector
MAACSEGMLQRMVRAFQREENGPERLNIPCPWQDFSATVGRALGSVFVSRVERGRTKGPLHEETLRAIREERQPDGETRRVLYERKAVARLTAADLDKIKDAARCPDVVAALRRWLDAGKPGDALPRSAHGDIIRHVRVCAGEFSSGVVLQRGSGQAQASNGGMVRTDIYSRDGKFYMVPVYAKDVADKRLPLRACVAHKDEKDWREMTADYRFLFSLTPDCYVLTENRKGEVKEGYFAGANRNTSAISLSLAHDKQNVIQGIGITTLKRFETYRVDRFGRLSPVRREADPRGRS

SEQ ID NO: 353 - protein, 1098 aa, synthetic construct
  REGION 1..1098: note = MG74-48 effector
MQVRDDVILGLDIGVGSLGWALLEEDLQTGEQRLLQRQAPQGETSYALGVRLFNVPENAKTKELLNVKRRTARMQRRTTARRAQRMRRVRALLDSLGVPGVRDADAFHLGKGRSAQCDPWQLRREGLERRLEAREWAVVLLHIAKHRGFRSNSKTDSSGSDKEMGQVLQAVSNLQQEVEASGLTVGALLASRERRRNRADHTGAPRYDLCMLRSLQEDEVNILFTRQRELGNPLAGEDIRCRYAELAFAQRPLAPVSHMVGPCAFLEGERRAPRFAPTAELFRYVQALCTMRLRQETGEETPLSEEQRQAACAVFCSVQSVTYKKLRQVLRLPAGCRFVGLSYGVTEKGKVQDPEKADVVMRTGKCCQGTACLRGILGDAYDALHEQRLDEADAARLAATDALSAPAAALLARGMAGLRLTDALVRIVSELNDLGQIRTILSLLPLPAPRIAALSQAAGEGKLGFFQGTARLSLRAMEAILPHMLACGEYAAACELAGFDPRAAQKTDLTDIRNPVVLRVFREVRRQFSAICREFGFLPGRVHVELLREVGKSGEERNRISRGLERRTKEKEAARKAMAELLHKSPEAVSTGEVQRYELWRQQDGKCAYYMLWRHAGGERAYGNAMPQGSIPPAWLADGVNAVQVDHILPRSRTFDNSFHNLCLCCHAANQTKGGRTPWEWLGAAQPQAWHDFEQWVQSLPLKGLKKRNYLLRDLSAEVQGRFHARNLTDSSYVARLTLRWLEEEYARHDVPMQDAEGRTRRRFFARPGQVTDFLRRHWGVQALKKIDGQRSGDRHHALDALLVAACSEGMLQRMVRAFQREENGPERLHIPCPWQDFSATVGRALGSVFVSRVERGRTKGPLHEETLRAIREERQPDGETRRVLYERKAVARLTAADLDRIKDAARCPDVVAALRRWLDAGKPGDALPRSAHGDIIRHVRVCAGEFSSGVVLQRGSGQAQASNGGMVRTDIYSRDGKFYMVPVYAKDVADRRLPLRACVAAKAEKDWREMTADYRFLFSLTPDCYVLTENRKGEVKEGYFIGSDRSTAAISLSLAHDRQQSLRGIGITTLKRFEKYRVDRFGRLSPVRREADPRGRS

SEQ ID NO: 354 - protein, 1098 aa, synthetic construct
  REGION 1..1098: note = MG74-49 effector
MQVCDNVILGLDIGVGSLGWALLEEDLQTGEQRLLQRQTPQGETAYALGVRLFNVPENAKTKELLNVKRRTARTQRRTTARRARRMRRIRALLDSLGVPGVRDADAFHLGKGRGAQCDPWQLRREGLERRLEAREWAVVLLHIAKHRGFRSNSKTDRSGSDKEMGQVLQAVSNLQQEVEASGLTVGALLASRERRRNRADHTGAPRYDLCMLRSLQEDEVDILFTRQRELGNPLAGEDVRRRYAELAFAQRPLAPVSHMVGACAFLEGERRAPRFAPTAELFRYVQALCNMRLRQETGEETPLSEEQRLAACSLFGSVQSVTYKKLRQVLRLPAGCRFAGLSYGVTAKGSVQDPEKADVVMRTGKCCQGTACLRGILGDAYDALHEQRLDEADAARLAATDALSAPAAALLARGMAGLRLTDALVRIVSELNDLGQIRALLALLPLPAPRIASLSQAAGEGKLGFFQGTARLSLRAMEAILPHMLACGEYAAACELAGFDPRAAQKTDVTDIRNPVVLRVFREVRRQFSAICREFGFLPGRVHVELLREVGKSGEERNRISRGLERRTKEKEAARKAVAELLHKSPEAVSAGEVQRYELWRQQDGKCAYYMLWRHAGGERAYGDAMPQGSIPPAWLADGVNAVQVDHILPRSRTFDNSFHNLCLCCHAANQAKGGRTPWEWLGAAQPQAWHDFEQWVQSLPLKGLKKRNYLLRDLSAEVQGRFHARNLTDSGYVARLTLRWLEEEYARHDVPMQDAEGRTRRRFFARPGQVTDFLRRHWGVQALKKIGGQRSGDRHHALDALLVAACSEGMLQRMVRAFQREENGPERLHIPCPWQDFSTTVGRALGSVFVSRVERGRTKGPLHEETLRAIREERQPDGETRRVLYERKAVARLTAADLDRIKDAARCPDVVAALRRWLDAGKPGDDLPRSAHGDIIRHVRVCAGEFSSGVVLQRGSGQAQASNGGMVRTDIYSRNGKFYMVPVYAKDVADKRLPLRACVAAKAEKDWREMTADYRFLFSLTPDCYVLTENRKGEVKEGYFAGANRNTSAISLSLAHDKQNVIQGIGITTLKRFEKYRVDRFGRLSLVRREADPRGRS

SEQ ID NO: 355 - protein, 1098 aa, synthetic construct
  REGION 1..1098: note = MG74-50 effector
MQVCDNVILGLDIGVGSLGWALLEEDLQTGEQRLLQRQTPQGETAYALGVRLFNVPENAKTKELLNVKRRTARTQRRTTARRARRMRRIRALLDSLGVPGVRDADAFHLGKGRGAQCDPWQLRREGLERRLEAREWAVVLLHIAKHRGFRSNSKTDRSGSDKEMGQVLQAVSNLQQEVEASGLTVGALLASRERRRNRADHTGAPRYDLCMLRSLQEDEVDILFTRQRELGNPLAGEDVRRRYAELAFAQRPLAPVSHMVGACAFLEGERRAPRFAPTAELFRYVQALCNMRLRQETGEETPLSEEQRLAACSLFGSVQSVTYKKLRQVLRLPAGCRFAGLSYGVTAKGSVQDPEKADVVMRTGKCCQGTACLRGILGDAYDALHEQRLDEADAARLAATDALSAPAAALLARGMAGLRLTDALVRIVSELNDLGQIRALLALLPLPAPRIAALSQAAGEGKLGFFQGTARLSLRAMEAILPHMLACGEYAAACELAGFDPRAAQKTDVTDIRNPVVLRVFREVRRQFSAICREFGFLPGRVHVELLREVGKSGEERNRISRGLERRTKEKEAARKAVAELLHKSPEAVSAGEVQRYELWRQQDGKCAYYMLWRHAGGERAYGDAMPQGSIPPAWLADGVNAVQVDHILPRSRTFDNSFHNLCLCCHAANQAKGGRTPWEWLGAAQPQAWHDFEQWVQSLPLKGLKKRNYLLRDLSAEVQGRFHARNLTDSGYVARLTLRWLEEEYARHDVPMQDAEGRTRRRFFARPGQVTDFLRRHWGVQALKKIGGQRSGDRHHALDALLVAACSEGMLQRMVRAFQREENGPERLHIPCPWQDFSTTVGRALGSVFVSRVERGRTKGPLHEETLRAIREERQPDGETRRVLYERKAVARLTVADLDRIKDAARCPDVVAALRRWLDAGKPGDDLPRSAHGDIIRHVRVRAGEFSSGVILQRGSGQAQAKNGGIVRTDIYSRNGKFYMVPVYAKDVADKRLPLRACVAHKDEKDWLELTEDYHFLFSLTPDCYVLTENRKGEVKEGYFEGPDRGSANISLSLAHDKKNTIRGIGIQNLKRFEKYRVDRFGRLSLVRREADPRGRL

SEQ ID NO: 356 - protein, 1117 aa, synthetic construct
  REGION 1..1117: note = MG86-1 active effector
MKKILSFDLGITSIGYSVLTEDEAQKYSLLDYGVSMFDKPTDKDGNSKKLLHAQALSTKKLYKLRKERKKNLALLFEKYALAKASKLLEQEKKNLYMYKWQLRAKKVFEERLSIGEIFTILYHIAKHRGYKSLDSGDLLEELCVELGIKIDVKKEKKDDEKGKIKQALSTIESLRKEYPKKTVAQIIYEVELQKERPVFRNHDNYNYMIRREHINDEIATIIRKQKEFGNFENIDSEVFIVDIIAAIDDQKESTNDMSLFGKCEYYPKEHVAHQYSLLSDIFKMYQAVANITFNKEKIKITKEQIRLLTEDFLNKIKKGKSVKELKYKDVRKILKLDESVKIFNKEDSYQRAGKKVEHTITKFHFVDNLSKIDKSFIEDIFNADESYVLMREIFDVIHKEKSPKRIYEQLKSKVSSEAVIIDLIRYKKGSSLNISSYAMAKFLPYFEEGMTLDAIKEKLDLGRKEDYSVYKKGIKYLHISTYEKDDDLEINNHPVKYVVSAVLRVVKHLHAKHGTFDEIKVESTRELSLNDKVKKEIDKANKAREKEIEKIISNDEYQKIAKEYGKNIHKYARKILMWEAQERFDVYSGKSIGIDDIFSNRVDVDHIVPQSLGGLYVQHNLVLVHRDENLQKSNQLPMNYITDKEAYINRVEHLFSEHKINWKKRKNLLASNLDEIYKDTFESKDLRATSYIEALTANILKRYYPFIDEKKSVDGSAVRHIQGRATANIRKVLGVKTKSRESNIHHGVDALLIGVTNPSWLQKLSNIFRENFGKIDDEARKNIKKALPYIDGVEVKDIVKEIEQKYNSYGEDSIFYKDIWGKAKTVNFWVSKKPMISKVHKDTIYADKGNGIFTVRESIIAKFINLKITPTTFPEDFMKKFHKEILEKMYLYKTNSNDVICKIVQQRAEEIKELLWSFEFLDVKNKEEMQEAKANLESLVHRELFDNNGNVVRKVKFYQTNLTGFKVRGGLATKEKTFIGFRAFKKDKKLEYKRIDVSNFEKIKKSNDGSFKVYKNDIVFFVFDEEKYKGGKIVSFLEDKKMAAFSNPKYPANIQAQPESFLTIFKGKANSHKQVSVGKAKGIIKLKVDILGNIESYQVLGNAKSKLLDEIKSIVSH

SEQ ID NO: 357 - protein, 1122 aa, synthetic construct
  REGION 1..1122: note = MG86-2 active effector
MKKILSLDLGITSIGYSVIEEFGNDRYSLIDYGVSMFDKATDKDGNSKKLLHSASTSTSKLYDLRKKRKKDLAQLFHNFGLGDKNSLLSQEKQNIYKNKWYLRCHKAFKEKLNINELFTIFYTLAKHRGYKSLDSSDLLEELCEKLNIPLETKTKKDDERGKIKKALKTIEELKQNSTKTVAQIIYEIELKKENPTFRNHDNYNYMIRREYIDQEIEKIIKTQKDFGLFDDKFDIDNFIEKLKDIITYQNPSTNDMRLFGNCEYYEDEKAAHQYSVISDIFKMYESVSNITFNTKPSIKITKEQINKIADDFFTKIKKGKNIADIKYKDIRKILALSDDTKIFNKDDSYISKGKKVEHTIIKFHFVNNLSKFDNSFIVENLNSLENLKEIFEVLQFEKDPTAIYEKLKDKIEDKQTIINLIKHKSGNSLNISAKAMVEFIPYFKDGLTTDKIKEKLELNRCEDYSKFYKGIKYLNIRQFEQDDNLDINNHPVKYVVSATLRVIKYLHIVCGTFDEIRVESTRELSQNEETKKAIEKANKELEKQINDIVQNKEYQNIAQHYGKNLQKYARKILLYEAQNRRDIYTGEGIEFEDIFTKKVDIDHIVPQSVGGLSVKHNLVLVFRDTNIQKSNQLPMNFVKDKQDFINRVEHLFSEHKINWKKRKNLLATNLDEIYKDTFESKSLRATSYIEALTAQILKRYYPFKDKEKQENGKAVSYIQGRATSNIRKILKVKTKTRDTNIHHAIDAILIGLTNQSWLQKLSNTFRENFGKIDEEARANIKKDMPIFEIIIDDEVKYLEPKELVELIEKNYNYDGENSIFYKDIWGKIKSVNFWVSKKPMVSKIHKDTIYSKKDDGIYTVRENIINHFINLKITPKTSSKKFEEEFNKKILNKMYLFKTNPKDAVCKAIIKRANDIKTLLDSFIDIDTKDKEAMNNAKTKLDELIHKDIPDNNGKPIRKIKFYQTNLTGFDVRGGLATKEKTFIGFKAQIINGKLNYTRIDVANIDKIKKENDNSFKVYKNDLVFFIYTDGTNKGGKIVSFLEDKRIAAFSNPRFPSSIGFQPHFFVTIFNGKANSHKQHSLNKAIGIIKLNLDILGNIKSYQKIGSCESELLEFIKKVIKD

SEQ ID NO: 358 - protein, 1122 aa, synthetic construct
  REGION 1..1122: note = MG86-3 effector
MLKRILSLDLGVTSIGYSVLEEKENDKYSLLDYGVSMFDAPYNKDGNSKKLLHSQNASTSKLYHLRKKRKKDLAKLFEKFKLGKSEEFLKQEKQNRYKHKWELRGKEVFERKLDISELFTIFYFLAKHRGYKSLDSSDLLEELIEKLGLSKEEKKSKKDDEKGKIKQALRTIEDLKQKFPEKTVASIIYMIEMQKSNPTFRNHDNYNYMIRREYINEEIEKILNIQKEFGLFDKSFELDKFTKELKEIITVQKESTNDLSLFGKCEFYPEYKVAHQYSLLSDIYKMYQAVSNITFDKSKIKIKKEQIQKVANFFLKKIKSGKKISDIKYKDIRAILNLDDAVKIFNKEDNYLRKGKKQENTIVKFHFVSNLAKFDNSFILKAFEKENPYRELKEIFDVLHEEKSPKSIYEKLKDKVDKKTIIELIKNKSGNSLNISSEAIIKCIPYFEDGLTLDEIKQKLDLKRSEDYSSFKKGIKYLHVNQFEKDDKLEINNHPVKSIVSITLRLIKYLHAIYGNFDEIKVESTRELSQNEQIKEDIKKANRDLEKKIDEIVENTEYQNIANQYGKNLKKYARKLLMWEEQERLDIYSGESIGLADIFSNIVDLDHIVPQSLGGLSVKHNFVLVHRNSNLKKSNNLPINFISDKQGYINRVEHLFSEHKINWKKRKNLLAENLDEIYKDTFESKSLRATSYAEALTAQILKRYYPFTNKTKQKDGSAVKHIQGRATSNIRKLLHIKTKSRDTNIHHAIDAILIGVTNHSWLQKLSNTFRENFGVIDEVVRKNIKKAVPYIEGMELKDLVNEIEQNYNSYGEDSIFYKDIWGKTKAINFWVSRKPISSKIHKDTIYAKKPNGIFTVRENIINKFIALKITAKTKPEDFINKFEKDILKKMYLYKTNSNDVICKIVIQRAKDIQKLLVSFENLDTKDKEVMTDAKSKLNALIHSDLIDNNGNIIRKIKFVPKTSPKDGFDIRKGKAISEKTFIGFKTYLEKDKLKYNRIDISNTQKINGKFVVYSKGFKVFKNNLVFFIFSDGTYKGGKIVSFLADKGIAAFSNSKFPASIANQPHSFLTFFNGKPNSHKQHSINKAIGLIKLDLDILGNIKSQQTIGNVQSKLFDFIKEILK

SEQ ID NO: 359 - protein, 1122 aa, synthetic construct
  REGION 1..1122: note = MG86-4 effector
MLKRILSLDLGITSIGYSVLEEKENDKYSLLDYGVSMFDAPYNKDGNSKKLLHSQNASTSKLYHLRKKRKKDLAKLFEKFKLGKSEEFLKQEKQNRYKHKWELRGKEVFERKLDISELFTIFYFLAKHRGYKSLDSSDLLEELIEKLGLSKEEKKSKKDDEKGKIKQALRTIEDLKQKFPEKTVASIIYMIEMQKSNPTFRNHDNYNYMIRREYINEEIEKILNIQKEFGLFDKSFELDEFTKELKEIITVQKESTNDLSLFGKCEFYPEYKVAHQYSLLSDIYKMYQAVSNITFDKSKTKIKKEQIQKVANFFLKKIKSGKKISDIKYKDIRAILNLDDAVKIFNKEDNYLRKGKKQENTIVKFHFVSNLAKFDNSFILKAFEKENPYRELKEIFDVLHEEKSPKSIYEKLKDKVDKKTIIELIKNKSGNSLNISSEAIIKCIPYFEDGLTLDEIKQKLDLKRSEDYSSFKKGIKYLHVNQFEKDDKLEINNHPVKSIVSITLRLIKYLHAIYGNFDEIKVESTRELSQNEQIKEDIKKANRDLEKKIDEIVENTEYQNIANQYGKNLKKYARKLLMWEEQERLDIYSGESIGLADIFSNIVDLDHIVPQSLGGLSVKHNFVLVHRNSNLKKSNNLPINFISDKQGYINRVEHLFSEHKINWKKRKNLLAENLDEIYKDTFESKSLRATSYAEALTAQILKRYYPFTNKTKQKDGSAVKHIQGRATSNIRKLLHIKTKSRDTNIHHAIDAILIGVTNHSWLQKLSNTFRENFGVIDEVVRKNIKKAVPYIEGMELKDLVNEIEQNYNSYGEDSIFYKDIWGKTKAINFWVSRKPISSKIHKDTIYAKKPNGIFTVRENIINKFIALKITAKTKPEDFINKFEKDILKKMYLYKTNSNDVICKIVIQRAKDIQKLLVSFENLDTKDKEVMTDAKSKLNALIHSDLIDNNGNIIRKIKFVPKTSPKDGFDIRKGKAISEKTFIGFKTYLEKDKLKYNRIDISNTQKINGKFVVYSKGFKVFKNNLVFFIFSDGTYKGGKIVSFLADKGIAAFSNSKFPASIANQPHSFLTFFNGKPNSHKQHSINKAIGLIKLDLDILGNIKSQQTIGNVQSKLFDFIKEILK

SEQ ID NO: 360 - protein, 495 aa, synthetic construct
  REGION 1..495: note = MG86-5 effector
MVFRDTNLKKSNQLPLNFIQDKQSFINRVEYLFKNYKINWKKRKNLLATTLDETFKDTFESKSLRATSYIEALTAQIFKRYYPFPNKEHQKNGIAVSHIQGRAISNMRKFLDIKTKTRDTNIHHSIDAILIGLINKSWLQKISNTFRQNFGIIDEKARENIKKELPTIEGVEPKEIVKMIEDNYNIYGEDSVFYKDIFKKTKVVNFWVSKKPMVSKIHKDTIYSKKANGIFTVRENIIKKFIALKLTVKTTPNEFDKKFKKDILDKLYLFKTNPKDKVCIAIQQRANEIKALLSSFKELDFKNKEEQSQAKTKLDNLIHSDIFDNNNKPIRKVKFYQTNLTGFDVRGGIATKEKTFIGFKANLENKKLKYERIDIANFNKIKKQNDNSFKVFKNDIVFFVYPNGSSKGGKIVSFLEDKKMGAFSNPKFPANIGMQPDSFLTIFNGKANSHKQQSLNKAIGIIKLNLDILGNIKSYSLIGDCKSEILDFIKDNIRK

SEQ ID NO: 361 - protein, 242 aa, synthetic construct
  REGION 1..242: note = MG86-6 effector
MSKKILSLDLGITSIGYSILEEKEYNKYSLIDYGISMFDKATDEKGNSKKLLHSAVTSQKRLYDLRKKRKQKLANLFEEFVLGNSNDFLEQEKQNIYKNKWKLRAKEIFERKLNIGEFFTIFYHIAKHRGYKSLDSDDLLEELCQELDIPFNTTKSTKKDDEKGKIKQALKTIEELKIKYPNKTVAQIIYKLEIKKDNPTFRNHDNYNYMIRREHIDQEIENLVLVQKKFGLFDDNFDDKNL

SEQ ID NO: 362 - protein, 825 aa, synthetic construct
  REGION 1..825: note = MG86-7 effector
MEKSLHLSNIENLIGFTYRNIADIKYKDIRKLLKLSDEVQIFGKEDFHVGKTGTKVQHTITKFHFLANLSKIDNSFIKSAFEKENKFEILKEIFDVLEFEKAPKSMYSQINDIFLKYELLEDEKLKDETIINLIKYKTGNSLNISAHAMIKFIPYFEKGMTIDEIKKELKLERKEDYSTYKKGIKHLHIKTFEADDNLEINNHPVKYVVSATMRLVKHLHATYGAFDEIRVESTRELSQNDEVKKAIKSANDANEKKFQEIMENEEYIKIANHYNKNLKKYARKLILWEEQEKLDIYTGKTIGFEDIFTNVVDIDHIIPQSLGGLTVKHNLVLAHRDDNVKKSNQLPMSFVKDTVAFNNRVEYLFKEYRINWKKKINLLATTLDDRYKDTFESKELRATSYIEALTAQMLKRYYPFPDKKKQVNGQAVAHVQGRATSNIRKLLGVKIKVRDTNIHHAIDAILIGLTNKSWLQKLSNTFRENMGVIDDEARANIKKELPLIEGIEPKELVELIEDAYNIYGEDAVFYKDIFGNTKAVNFWVSKKPMSSKIHKDTIYAKKPNNFFTVREDIIKQFVVLKTVVTTDSEVFIKGFEKKILLKMYLFKTNPNDIICKIVKSRADEVKFLLQSFVDIDSKNKEDMAEAKERLDVLIHKELVDNNGNVIRKVKFYQTNLTGFEIRGGLATKEKTFIGFKATKESGKLFYERIDVSNFKRIQKENDGSFKVYKNDIVFFVYEDDSFRGGKIVSFLADKKIVSFSNSRFPASIKFQPHSFLTLFKGVPNSHKQHSVNKAIGIIKFNLDILGNIKSYIKFGEVSKEVELKIFHKE

SEQ ID NO: 363 - protein, 1136 aa, synthetic construct
  REGION 1..1136: note = MG86-8 effector
MQEEEIMSKKILSLDLGTTSIGYSILNEMDNDRYALIDYGISMFDKATDKDGKSKKLLHSASQSSANLHDLRKERTQNLAMLFEKYKLGRVDALLEQERENRYTDKWYLRAEKAFSEKLETEELFTVLYLMAKHRGYKSLDTDDLLEELLLDLGFEVEEKKEKDAEKGKIKQALKAVESFRQKYPEKTVARIIYEIEIKKDNPTFRNHDNYNYMIRREYINEEIRKIVQAQSKFGLFAKDFDVEVFIKELIVTIDDQKDSTNNLSLFGNCEYYSEHKVAHQYSLLSDVFKMYQSVANITFRKIKITKEQIQIIADDFFKKIQIGKNIADIKYQDIRKLLKLGEGVQVFAKEDYHLDKKGKKVHHTITKFHFLANLSKIDNRFIKSAFEKENKFEILKEIFDVLEFEKAPRGIYIQINEIFMKHKLVDDERLKDETIINLIKYKSGSSLNISAYTMIKFIPYFEKGMTSDEIKQVLKLERNEDYSNYKKGIKYLHTTNFEKDDNLEINNHPVKYVVSATMRLVKHLHATYGAFDEIRVESTRELSQNEETKKAIEKANRENEVKFQKIIENEEYIKIANHYNKNLKRYARKLTLWEEQEKLDIYTGKTIGFEDIFTNAVDIDHIIPQSLGGLSVKHNLVLAHRDDNVKKSNQLPMNFVKDKVDYVNRIEYLFKEYKINWKKKINLLATTLDERYKDTFESKELRATSYIEALTAQMLKRYYPFPDKKKQANGQAVAHVQGRATSNIRKLLGVKIKVRDTNIHHAIDAILIGLTNKSWLQKLSNTFRENMGVIDDRARANIKKEIPLIEGIDPKELVELIEDAYNVYGEESVFYKDIFGKTKAVNFWVSKKPMSSKIHKDTIYAKKPNGLFTVREDIIKQFIALKITTTTDSELFMKAFEKKILQKMYLFRTNPNDVICRIVKSRGDELKSLLQSFVGVDTKDKEIMAEAKEKLDALMHKELLDNNGNTIRKIKFYQSNLTGFDIRGGLATKEKTFIGFKAVLEKEKLVYERIDASNFKRIKKENDASFKVFKNDVVFFVFSDNTFRGGKLVSFLEDGTIASFQNPRYPAAVQFQPSLFCILGKDKEGNPKKSSSKQYKNGKAIGIIKLNLDILGNIKSYSKFGEVSQEVEKSIFHKE

SEQ ID NO: 364 - protein, 1127 aa, synthetic construct
  REGION 1..1127: note = MG86-9 effector
MNMSKRILSLDLGITSIGYSILNEMDSNKYGLVDYGVSMFDKATDKDKKSKKLLHSASKSSSKLYDLRKERTRNLANLFEKYNLGSASELLNQEKQNRFINKWYLRAEKSFSERLTIEELFSIFYLVAKHRGYKSLDTDDLLEELLIELGFKVEEKKEKDAEKGKVKQALKTVESFRKKYPEKTVARIIYEIEIQKENPTFRNHDNYNYMIRREYINEEIRKIVQAQDEFGLFDAGIDIELFIKELIDTVDDQKDSTNDMSLFGNCEYFPEHKVTHQYSLLSDIFKMYQSVANITFGKTKISKEQIETIVNDFFKKIKLGKNIADIKYQDIRKVLKLNDEVKIFSKEDYHLDKKGKKIHSTITKFHFLSSLGKIGKSFIESIFEKENKFEILKEIFDVLEFEKAPKSMYNQINEIFIKYTLVEDEKLKNETIINLIKHKSGNSLNISAYTMIQFIPYFERGMTTDEIKQELKLERNEDYSTYKKGIKHLHVKTFEKDDNLEINNHPVKYAVSATMRLVKHLHVTYGVFDEIRVESTRELSQNEETKKAIEKANKENQAKFQKIIDNEEYQKIANHYNKNLKRYARKIMLWEEQEKLDMYSGEVISFNDIFSNKVDIDHIIPQSLGGLSVKHNLVLAHRDENHKKSNQLPMHFVVDTVDYVNRVEHLFKEYKINWKKKINLLAETLDDRYKDTFESKELRATSYIEALAAQMLKRYYPFPDKEKQANGQAVAHVQGRATSNIRKLLGVKTKVRDTNIHHAIDAILIGLTNKSWLQKLSNTFRENMGVIDDKARANIKKEIPLIEGIEPKELVELIEDAYNIYGEDSVFYKDIFGDTKVVNFWVSKKPMSSKIHKDTIYAKKPNGLFTVREGIIKQFIALKTTVTTDPEQFMKNFEKKILQKMYLFMTNPNDVICKIVISRAEEINLLLQSFVNIDRKNKEDMSEAKEKLDKLMHKELLDNNDNVIRKVKFYQSNLTGFDIRGGLATKEKTFIGFKATLENEKLVYERIDASNFKRIQKENDGSFKVYKNDIVFFVYPDGSFRGGKIVSFLADKGITAFLNSKFPSASELQPKSFCKMDKGKKSGAKQQSINKSIGIIKLNLDILGNIKSYSNFGEVSKEVELKIFHKE

SEQ ID NO: 365 - protein, 1125 aa, synthetic construct
  REGION 1..1125: note = MG86-10 effector
MKKKILSLDLGITSIGYSILDEMDNDRYALIDYGVSMFDKATDKDGKSKKLLHSASKSSTKLYDLRKSRIRKLANLFEKYGLGKAVELLKQEKENRFTNKWYLRAEKSFTKCLSVNELFSILYLMAKHRGYKSLDTDDLLEELLIELGFDVEEKKEKDAEKGKIKQALKTVESFRKKYPDKTVARIIYEIEIQKENPTFRNHDNYNYMIRREYINEEIAKIVKAQNDFGLFDKSIDIELFIKELILTIDDQKDSTNDMSLFGNCEYYPEHKVAHQYSLLSDIFKMYQSVANITFGKTKISKEQIKIVADDFFKKIKQGKNIGEIKYQDIRKVLKLSDEVQIFGKEDYRLDKKGKKVHHTIIRFHFLSSLGKMDNTFIKSIFKQENKLEILKEIFDVLEFEKAPRSIYKQVNEIFVKYALVDDKKLKDETIINLIKHKSGNSLNISAHAMIQFILYFAKGMTTDEIKKELKLERNEDYSNYMKGIKYLHVKSFEKDDNLEINNHPVKYVVSATMRLVKHLHAMYGAFDEIRVESTRELSQNEETKKAIDKANKEQEKRFQEILGNDEYQKIANHYNKNLKKYARKIMLWEEQEKLDIYSGKVIGFDDIFSNKVDIDHIIPQSLGGLSVKHNLVLAHRDENIKKSNQLPMHFVANKTEYINRVEYLFKEYRINWKKKINLLAETLDERYKDTFESKELRATSYIEALTAQMLKRYYPFPDKQKQANGQAVVHVQGRATSNIRKLLGVKTKVRDTNIHHAIDAILIGLTNKSWLQKLSNTFRENMGVIDDEARANIKKEIPLIEGVEPKELVELIEDAYNVYGEDSVFYKDIFGNTKTVNFWVSKKPMSSKIHKDTIYAKKPNGFFTVREDIIKQFIALKTTVTTDSETFKKNFEKKILQKMYLFKTNSNDVICKVVQSRADEVKNLLDSFVDIDTKNKESMSEAKEKLDSLIRKELLDNNGNVIRKVKFYQSNLKGFDIRGGLAIQEKTFIGFKATLKNKKLGYERIDASNFRKIQKINDGSFKVYKNDVVFFVYEDDNFKGGKIVSFLEDKKMGSFSNPRYPASIKFQPHSFLTLFKGVPNSHKQHSLNKAIGIIKLNLDILGNIKSYSKFGEVSKEVELKIFYKE

SEQ ID NO: 366 - protein, 1136 aa, synthetic construct
  REGION 1..1136: note = MG86-11 effector
MSNKILSLDLGITSIGYSILEEMKNDRYSLLDYGISMFDKPTDKDGNSKKLLHSQSVSTTKLYDLRKERKQNLASLFEEFHLSTKALLLNQEKQNVYIQKWELRAKKAFEEKLEVGELFTIFYALAKHRGYKSLDSGDLLEELCVNLGIEREQSNNKKKDDDEKGKIKNALKTIENLRLDFPEKTVAQIIYETELQKENPTFRNHDNYNYMIRREYINDEIKKIIVFQKEFGFFSSNFDVEEFTSSIIATIDDQKDSTNDMSLFGFCEYYKDEEQKVAHQYSLLSDIYKMYESVSNINFNANPTIKITPEQIKLVADDFFTKVKKGKSIADIKYKDIRKILNLDDDFKIFNKDDSYSNKGKQQENRIIKFHFVNNLSKINNQFIVDIFEKENRYELLKEIFDVLAYEKAPHAIYEQLKDKIKDEKTIIDLIKYKSGNSLNISHYAMMKFIPYFEQGLNTDEIKEKLGLDRKEDYSSFKKGIKYLHINRFEEDDNLKINNHPVKYVVSATLRVIKHLHSIHGAFDEIRVESTRELSQNEQTKKDIEKANRVFEKELDAIVDDVEYQKIAEQYGKNLRKYARKILMYKEQEGRDIYSGEGIELKDIFTNIVDLDHIIPQSLGGLSVKHNFVLAHRDTNVQKSNQLPLNFVKEKQAFINRVEYLFEHHKINWKKKKNLLATTLEESFVDTFESKPLRATSYIEALTAQVLKRYYPFPNEKKESDGSAVRHIQGRATSNIRKLLGVKTKVRDTNIHHAIDAILIGFTNHSWLQKLSNTFRENMGVIDDEARSNIKKETPIIELIVNDEVEYLSPKELCEKIEESYNEFGEDSVFYRDVWGKVKVVNFWVSQKPMVSKIHKDTIYSKKRDSIFTVRENIINKFVLLKITSTTSSQKFMENFEKNILKKMYLFKTNPKDVICQIVQNRAKNIATLLDTFMEIDTENKEQISDAKGKLEQLMHKDLLDNNANIIRKIKFYQTNLTGFDVRGGLATKEKTFIGFRAWLEGENLQYERIDIANFDKIKKENDSSFKIYKNDVVFFVYADGSYRGGKIVSFLDYKGIASFSNSNYPALSEYQPKSFCKMGKDKHGNPKKSGAKQQTINASIGIIKLNLDITGNIRSYQVIGNVQSELLDFIKGIIK

SEQ ID NO: 367 - protein, 1129 aa, synthetic construct
  REGION 1..1129: note = MG86-12 effector
MEKIMNKKILSLDLGITSIGYAILNEIDNDRYELVDYGVSMFDKATDKDGKSKKLLHSASQSSANLHGLRKIRTKNLASLFEKYNLGNAVDFLRQERENTYIDKWYLRAEKSFTEKLKIEELFTILYLMTKHRGYKSLDTDDLLDELLVELGFEVEAKKEKDAEKGKIKQALKTVESYRKKYPAKTVARIIYEIEIKKENPTFRNHDNYNYMIRREYIREEIKKIVLAQNEFGLFTKDFDVDSFIEELIATIDDQKDSTNDLSLFGNCEYYSEHKVAHQYSLLSDIFKMYQSVANITLNKTKITKEQIKIIADDFFKKIEKGKNIADIKYQDIRKVLKLNDEVKIFGKEDYHLNKKSIKVHHTITKFHFLSSLGKIDNTFIKSTFTKENKLEILQEIFDVLEFEKAPKSIYNQLNEIFGKYVLVEDESVKNKTIINLIKYKSGNSLNISAYAMRKFIPYFEKGMTSDEIKQELKLERNEDYSNYYKGIKYLHVNQFEKDDNLEINNHPVKYVVSATMRLVKHLHATYGAFDEIRVESTRELSQNEETKKAIDKANKANEKKFQEIVENEEYQKIANHYNKNLKKYARKIMLWEEQEKLDVYTGKTIGCEDIFTNVVDIDHIIPQSLGGLSVKHNLVLAHRDENVQKSNQLPMNFVKDKKAYENRIEHLFKEYRINWKKKINLLATTLDEAYQDTFESKALRATSYIEALTAQMLKRYYPFLDKKKQANGQAVAHVQGRATSNIRKLLDVKIKVRDTNIHHAIDAILIGLTNKSWLQKLSNTFRENMGVIDDEARANIKKEIPLIEGVEPKELVELIEDAYNIYGEESVFYKDIFGKTKAVNFWVSKKSMSSKIHKDTIYAKKPNNLFTVREDIIKQFIALKITVTTDSETFMKAFEKKILQKMYLFKTNPNDVIVKIVNHRGNELKSLLQSFVNIDIKNKEVMSEAREKLDTLIHQKLVDNNGNIIRKVKFYQSNLTGFDIRGGLATKEKTFIGFRATSNNEKLFYERIDASNFKRIQKENDGSFKVYKNDVVFFIYEDEIFKGGKIVSFLEDKKIASFSNPRYPASIKFQPHSFLTLFKGIPNSHKQYSLNKAIGIIKLNLDILGNIKSYSKFGVVSKEVELKIFHKE

SEQ ID NO: 368 - protein, 1123 aa, synthetic construct
  REGION 1..1123: note = MG86-13 effector
MSKKILSLDLGITSIGYSVLDEMQNDRYRLLDYGVSMFDKATDKDGNSKKLLHSINSSTANLYALRKKRKQNLASLFEAFGLGEKTTLLQQEKNNLYKNKWQLRAKKAFEEKLEVGELFTIFYALAKHRGYKSLESGDLLEELCEKLGIEVQSASKQKKDDDEKGKIKKALKTIENFRVENPEKTVAQIIYEAEIKKENPTFRNHDNYNYMIRREYINDEIGKIIKMQENFGFFECSFDVDLFITKLIATIDDQKDSTNDLNFFGNCQYYDDEKAAHQYSLLSDIFKMYESVANITFNAKPVVKITKEQIQLITDDFFKKIVKGKNVTEIKYKDIRKILQLSDDMKIFNKEDSRIIKGKKSDNTIIKFHFLNNLSKINNNFITKALEQENKYEILKEIFDVLAYEKAPHTIFENLKNKIEDEQTIIDLIRYKSGNSMNISHYAMMQFIPYFEEGFTTDAIKEKLGLDRQEDYSKFKKGIKYLHVNNFEKDDKLEINNHPVKSVVSATMRVVKHLHATHGAFDEIRVESTRELSQNEETKKEIEKANKALQKEIDTIVNNKEYQEIAKSYGKNLKKYARKILMYLAQEGRDIYSGKGIEIADIFTNSVDLDHIVPKSLGGLSVKHNLVLAHRNTNVQKSNQLPLNFVADKQAFINRVEYLFSEHKINWKKRKNLLATNLDETFQDIFESKSLRATSYIEALTAQMLKRYYPFANEKKRVDGSAVRHIQGRATSNIRKLLHVKIKVRDTNIHHAIDAILIGLTNQSWLQKLSNTFRENMGIIDDEARAKIKKEIPLIEGIEPQELIEMIEDRYNVFGEESVFYKDIWGKTKVINFWISKKPMVSKIHKDTIYAKKPNGFYTVRESIINKFGGLKITPKTSSEEFIKIFKKNILHKMYLYKTNPKDTMCQIIQKRGEAIATLLDSFTDFDSKNKEQMSEAKMALDSLIHSDLVDNNGNIVRKVKFYQTNLTGFDVRGGLATKEKTFIGFQSWLENEKLHYKRIDVANFKKIKKQNDGNFQVFKNDIVFFVYPNGSFRGGKIVSFLEENKTGAFQNSKFPMSLKYQPEIFCELNKEKKHVKTKPRSIGKSTGIIKLNLDIIGNIKSYTCIGKIESEILDFIKASVNG

SEQ ID NO: 369 - protein, 1117 aa, synthetic construct
  REGION 1..1117: note = MG86-14 effector
MAHMKKILSLDLGITSIGYSILDELENDRYSLLDYGVSMFDKPTDKDGNSKKLLHSASMSQTNLYNLRKKRKENLAQLFEEFSFGKKEDFLQQERENLHVNKWELRAKKAFQEKLEVSELFSILYLLAKHRGYKSLDSDDLLEELCQKLELHVDITKKKKDDERGKIKAALVNIEHLREQYPHKTVAQIIYEVEKSKQNPTFRNHDNYNYMIRREYINDEIKKIIKAQESFGLFNFTTDEFIAKLIATIDDQKEATIDPSLFGNCEYYPQEKVAHQYSLLSDIFKMYQSVANITFNKEKVKITPQQIHLVANDFFSKLKKGGKNIVDIKYKDIRKVLKLDENIKIFNKDDSYLNRGKKQEHTITKFHFVANLSKMDNTFIIEILEKANPYEIFREIFDVLAYEKAPQTIYDKLKDTIDDETIVSLIKYKNGKSLNISHYAMTRFLPFFEQGLSTDEIKKKLNLERKEDYSQYKKGIKYLHVKSFEHDENLEINNHPVKYVVSAVLRLIKHLHVNHGPFDEIRVESTRELSQNEQTKKDIVKANRALEKEIDVIIANEEYQKIAQHYGKNLRKYARKILMWEEQERFDIYSGKSIGFEDIFTNVVDLDHIVPRSVGGLSVKHNFVLAHRDINVQKSNRLPLDFVVDTEAFINRVEHLFAEHKINWKKKKNLLATTLDETFKDTFESKDLRATSYIEALSAQILKCYYPFTDKKKQHDGSAVRHIQGRATSNIRKLLHVKTKVRDTNIHHAIDAILIGLTNRSWLQKLSNTFRDNLGVIDDEARAKIKKEMPLIEGIEPKELVTMIEDAYNFYGEDSVFYKDVWGKIKVVNFWVSKKPMVSKIHKDTIYAKKEDGIYTVRESIIDKFAELKTTTTTDADTFMKSFEKNVLHKMYLHKTNPKDFTCKAVTNRADAIYELLKSFDSLDKKDKALMSEAKAKLDDLIHRDILDNNTNVIRKVKFFQTNLTGFNIRGGLATKEKTFIGFKAELKDDKLCYERIDVANFNTIKKENDKSFKAYKNDVIFFMYGDGSFRGGKIVSFLEDKKIAAFSNPKFPVSYKFQPDSFCKDKAHTGAKQHALNKAIGIIKLNLDITGKIKSYQSIGTIESELLQFIKEAIHG

SEQ ID NO: 370 - protein, 1104 aa, synthetic construct
  REGION 1..1104: note = MG86-15 effector
MKKILSLDLGITSIGYSILEKKQNNHYTLIDYGVSMFDSPFDKDGKSKKLLHSTNTSMSNLYAKRKQRKKALAKLFEEFGLEKAHKLLQQEKQNIYKNKWQLRCDDVFTRELSVGEFFTILYFIAKHRGYKSLDTNELLEELCEELKLNCEMKSSKKDDEKGKIKQALKRVEELKQNTNKTVAQIIYELELQKQTPTFRNHDNYNYMIRREYIEDELKKLVDAQQHFFKNNKDEFFEKLKEIIIKQDESSNDLNLFANCEYYKEHKVANQYSVVADIFKMYESVANITLNKEKITKEQIKLIADDFFIKIKKGKNIADIKYKDIRKILKLSDDIKIFGKSDSYVSKGKTIHNTIIKFHFLNNLSKFDNSFIVQNLDNLEKLAEIFEVLNKEKSPKTIFEKLNGNVDEKTIIKLIRYKSGKSLNISHYAMLKFIPYFQEGLTTDEIKQKLDLNRCEDYLAYKKGIKYLHINQFEKDDNLEINNHPVKYIVSAVMRVVKHLHTLYGAFDEIKVESTRELSLDDKTRKDIQKANQEFEKKLDDIKQNSQYQQIAQEYDKNLSKYTKKILMWQEQDRVDIYSGKTIGLNEIFSNEVDIDHIVPQSIGGLSVKHNLVLVHRDTNLQKSNQLPMNFVADKVGLKNRVEKLFSEHKINFKKMKNLLATNLDEIYKDSFESKSLRATSYIEALTAQMLKRYYPFADKQKQKDGSAVRHIQGRATSNIRKLLHVKTKVRDTNIHHGIDALLIGVTSHSWLQKISNTFRENFGVIDDKARERVKKELPLIEGVSVAELVAHIEENYNIYGEESVFYKDVFGNVRVVPFWVSKKSMVSKIHKDTIYAKKQNGIFTVREKILNKFISLKITPKTSSDEFMKKFKKEILEKMYLYKTNPKDKICAIIEQRAFEIAKLLDSLQLKDTTDKEMLSETKKYLDEFIHQDLKDYNGNVIRKVQFYQTNLTGFEIRGGLATKEKTFIGFSAILNGKKIKYKRIDVANFESMKKVDGFKVYKNDVVFFIYPDGSFNGGKIVSFLEDKKMASFSNPRFPANIGLQPHSFVTLFKGKANSHKQHSLNKAIGIIKLNLNVLGNIKSFSSMDEVDGELLEFLKGLKG

SEQ ID NO: 371 - protein, 1104 aa, synthetic construct
  REGION 1..1104: note = MG86-16 effector
MKKILSLDLGITSIGYSILEKKQNNHYTLIDYGVSMFDSPFDKDGKSKKLLHSTNTSMSNLYAKRKQRKKALAKLFEEFGLEKAHKLLQQEKQNIYKNKWQLRCDDVFTRELSVGEFFTILYFIAKHRGYKSLDTNELLEELCEELKLNCEMKSSKKDDEKGKIKQALKRVEELKQNTNKTVAQIIYELELQKQTPTFRNHDNYNYMIRREYIEDELKKLVDAQQHFFKNNKDEFFEKLKEIIIKQDESSNDLNLFANCEYYKEHKVANQYSVVADIFKMYESVANITLNKEKITKEQIKLIADDFFIKIKKGKNIADIKYKDIRKILKLSDDIKIFGKSDSYVSKGKTIHNTIIKFHFLNNLSKFDNSFIVQNLDNLEKLAEIFEVLNKEKSPKTIFEKLNGNVDEKTIIKLIRYKSGKSLNISHYAMLKFIPYFQEGLTTDEIKQKLDLNRCEDYLAYKKGIKYLHINQFEKDDNLEINNHPVKYIVSAVMRVVKHLHTLYGAFDEIKVESTRELSLDDKTRKDIQKANQEFEKKLDDIKQNSQYQQIAQEYDKNLSKYTKKILMWQEQDRVDIYSGKTIGLNEIFSNEVDIDHIVPQSIGGLSVKHNLVLVHRDTNLQKSNQLPMNFVADKVGLKNRVEKLFSEHKINFKKMKNLLATNLDEIYKDSFESKSLRATSYIEALTAQMLKRYYPFADKQKQKDGSAVRHIQGRATSNIRKLLHVKTKVRDTNIHHGIDALLIGVTSHSWLQKISNTFRENFGVIDDKARERVKKELPLIEGVSVAELVAHIEENYNIYGEESVFYKDVFGNVRVVPFWVSKKSMVSKIHKDTIYAKKQNGIFTVREKILNKFISLKITPKTSSDEFMKKFKKEILEKMYLYKTNPKDKICAIIEQRAFEIAKLLDSLQLKDTTDKEMLSETKKYLDEFIHQDLKDYNGNVIRKVQFYQTNLTGFEIRGGLATKEKTFIGFSAILNGKKIKYKRIDVANFESMKKVDGFKVYKNDVVFFIYPDGSFKGGKIVSFLEDKKMASFSNPRFPANIGLQPHSFVTLFKGKANSHKQHSLNKAIGIIKLNLNVLGNIKSFSSMDEVDGELLEFLKELKG

SEQ ID NO: 372 - protein, 1127 aa, synthetic construct
  REGION 1..1127: note = MG86-17 effector
MSKKILSLDLGITSIGYSVLEEVSENRYSLLDYGLSMFDKPTDKDGNSKKLLHSAASSTKNLYTLRKKRKKSLAKLFELSDISTSSKLLNQEKENLYINKWELRAKEAFCRRLEVGELFTIFYALAKHRGYKSLESGDLLEELCEELKIEYNFTKKKEDEDKGKIKLALKTVESLRLENPHKTVAQIIYEEEILKSTPTFRNHDNYNYMIRREYINDEIKKILLAQEKFGFFKSDFDVTAFIKRVIETIDDQKESTIDLSLFGNCEYYPKYKVAHQYSLLSDIFKMYESVSNITFNTKPTLKITPSQIKVIAEDFFAKVKKGKSIGEVKYKDIRKILQLGDDVKIFNKEDSYLRAGKKIENIIIKFHFVNSLSKIDNSFILNALEDERGYEVLQKIFDVLAYEKSPKSIYEKLKNLVDEKTIIVLIQNKHGNSLNISHYAMVQFIPHFKEGLTTDEIKKILGLERKEDYSKYRKGIKYLTIAEFEKDENLEINNHPVKYVVSATLRVVKHLHSVYGAFDEIRIESTRELSQNEQTKKDIEKANRALEKEFSRITEDKEYQKIADSYGKNIKKYARKILLWEEQEYLDICSGKVIGLGEIFSNEVDLDHIIPKSLGGLSVKHNFVLAHRDTNVQKSNRLALDFVSDREAFINRVEHLFSSHKINWKKRKNLLATSLDETFQDVFESKSLRATSYIESLTAQLLKCYYPFTNKKKQLDGSAVRHIQGRATSNIRKLLGVKTKVRDTNIHHAIDALLIGFTNHLWLQKLSNTFRENMGLIDDEARAKIKKEFPIIELVVNDEVEYLEPKELCDRIENAFNSYGEESVFYKDVWGKNRVVSFWVSKKPMVSKIHKDTIYEKKKDGIFTVRESILNKFIGLKITPTMSSQKFTDIFNKNILEKMYLFKVNPKDFICVVIQKRADEIAELLGSLEALDKKDKERVSKAKVDLEALIHKEILDNNGNSIRKVKFFQTNLTGFDVRGGLATKEKTFIGFRTWLKEGKLNYERIDVANLQKIEKLNDSSFKVYKNDEIFFIMPDGSRRGGKIVSFLEETKKSAFQNAKYPTSSEYQPMPFCKMNKGKKSGAKQQSIGKAIGIIKLNLDIIGNIKSYQVIGDAKSDFLDFVKESIRG

SEQ ID NO: 373 - protein, 1119 aa, synthetic construct
  REGION 1..1119: note = MG86-18 effector
MKQILSLDLGITSVGYSVIQEHETDKYSLIDYGVSMFDKPTDKDGNSKKLLHSQALSAKNLHKLRKKRKQNLASLFDQYHLANKQKLLEQERDNLYKNKWELRAKKVFEEKLSVDEIFTILYHIAKHRGYKSLDSGDLLEELCDSLGIETETAKPKKDDEKGQIKQALKSVEALYEEYPQKTVAQIIYELESKKENPIFRNHDNYNYMIRREYINDEIRKIIKAQIAFGAFRAIDDAFINDVIAVIDDQKESTNDLSLFGKCEYYPEYYVAHQYSLLSDIFKMYQAVANITFNKEKIKITKEQIALIAEDFLGKIKKGKSVKDIKYKDIRKVLKLDDDIKIFNKDDSYLNKGKKQENTITKFHFVDTLSKIDKSFVEDIFASDESYRLMREIFDVLHYQKSPKLIYEQLKNKISDEQVIIDLIRNKKGSSLNISSFAMLQLLPYLEEGLTLDEVKQKIGLQRQEDYAQYKKGIKYLHITSYEKDDELEINNHPIKYAVSAALRVVKHLHAEYGTFDEIKVESTRELSLGEKARKEIEKANRAFEKEIEQIVENAEYQKIAKSYGKNLRKYARKILMWEEQERLDIYSGKSIGITDIFSNSVDLDHIVPQSLGGLSVKHNFVLVHRDENLQKSNQLPMNYIKDTQAYTNRVEHLLREHKINWKKAKNLLATNLDEVFKDRLESKSLRATSYIEALTAQMLKRYYPFKDVQKLKDGSAVRHLQGRATSNIRKVLGVMTKSRETNIHHAIDAILIGVTSHSWLQKLSNTFRENFGCIDDEARKNIKKALPYMDGMEIKDLVKEIEEQYNSFGEDSIFYRDIWGKVKTVNFWVSKKPMSSKIHKDTIYAKKGDGIYTVRENIIAKFIGLKVIPMTSPEEFMKKFHKEILQKMYLFKTNPQDVICKLVEQRGEEIKELLWSFEFLDVKNKEQMSEAKTKLELLIHKDLLDNNGNVIRKVKFYQTNLTGFDVRGGLATKEKTFIGFRAYKEDSKLEYERIDVANVEKIQKTNDGSFKAYKNDIVFFIYNDGSFKGGRVVSYIKKSSGSKLCAFLNPRFPTASEYQPSSFCKIEKGKHSGAKQQSIGSAKGIIKLNLDTLGNIKSYQVLGNVESKILDEIKSIVSH

SEQ ID NO: 374 - protein, 1126 aa, synthetic construct
  REGION 1..1126: note = MG86-19 effector
MSKKILSLDLGITSIGYSILEELNNDRYSLIDYGVSMFDKPTDKDGKSKKLLHSASVSAKKLHTLRKERKTNLAQIFEDYKLSNKTTLLNQEKQNIYTNKWELRAKKAFEEKLEISELFTIFYVLSKHRGYKSLDSDDLLEELCQKLGIEVDTKKATKEDDEKGKIKKALQTIENLRIKYPDNTIAQIIYETEILKENPTFRNHDNYNYMIRREYINDEITKIIKAQNGFKAFNFDVDEFIEAIINTIDDQKDSTNNMDLFGNCEYYKEEKVAHQYSLLSDIFKMYQSVSNITFNIAELCEVNPLQKNIKIQKEQIKLIADDFFTKIKKGKNIADIKYKDIRKVLKLSDDFKIFNKEDSYLNKGKKQENTITKFHFVNNLSKIDNSFILNALKQDNRYEILREIFDVLSQEKAPHSIYEKLKDKVDDKTIISLIKYKNGNSLNISHHAMIKFIPYFEEGLTTDEIKQKLGLDRKEDYSEFKKGIKYLHIKTFEKDNNLDINNHPVKYVVSATLRVIKHLHTTYGAFDEIRVESTRELSQNEQTKKDIEKANRALEKEINNIVENKEYQKIADSYGKNLKKYARKILMWEEQNRLDIYSGKNIGFEDIFTNSVDLDHIVPQSLGGLSVKHNFVLVHRDTNLQKSNQLPINFIKDKQEFINRVEYLFSEHKINWKKKINLLANNLDEVFKDSFESKSLRATSYIEALTAQVLKRYYPFPNEKKQNDGSAVRHIQGRATSNIRKLLHVKTKVRDTNIHHAIDAILIGLTNASWLQKLSNTFRDNMGVIDDEARAKIKKEMPLIEGIEPKELVEMIEDRYNEFGEDSIFYKDIFSNVKAVNFWVSKKPMVSKIHKDTIYAKKQDGIFTVREGIINKFVGLKTTTTTSPSKFMESFEKNILKKMYLHKTNPKDAICQIVQKRANEIAILLESFVDLDTKNKELMSDSKVKLDELFHSDMLDNNGNVIRKVKFFQTNLTGFEIRGGLATKEKTFIGFKATLKDSKLKYTRIDVANFEKIQKENTDSFKVFKNDLVFFIYSDGSFRGGKIVSFLEEKGMGAFSNSRFPASIGLQPHSFLTMFNGKANSHKQISLNKAIGIIKLNIDIIGNIKSYQVIGDVKGELLEFIKKLTQ

SEQ ID NO: 375 - protein, 1104 aa, synthetic construct
  REGION 1..1104: note = MG86-20 effector
MKKILSLDLGITSIGYSILEKKQNNHYTLIDYGVSMFDSPFDKDGKSKKLLHSTNTSMSNLYAKRKQRKKALAKLFEEFGLEKAHKLLQQEKQNIYKNKWQLRCDDVFTRELSVGEFFTILYFIAKHRGYKSLDTNELLEELCEELKLNCEMKSSKKDDEKGKIKQALKRVEELKQNTNKTVAQIIYELELQKQTPTFRNHDNYNYMIRREYIEDELKKLVDAQQHFFKNNKDEFFEKLKEIIIKQDESSNDLNLFANCEYYKEHKVANQYSVVADIFKMYESVANITLNKEKITKEQIKLIADDFFIKIKKGKNIADIKYKDIRKILKLSDDIKIFGKSDSYVSKGKTIHNTIIKFHFLNNLSKFDNSFIVQNLDNLEKLAEIFEVLNKEKSPKTIFEKLNGNVDEKTIIKLIRYKSGKSLNISHYAMLKFIPYFQEGLTTDEIKQKLDLNRCEDYLAYKKGIKYLHINQFEKDDNLEINNHPVKYIVSAVMRVVKHLHTLYGAFDEIKVESTRELSLDDKTRKDIQKANQEFEKKLDDIKQNSQYQQIAQEYDKNLSKYTKKILMWQEQDRVDIYSGKTIGLNEIFSNEVDIDHIVPQSIGGLSVKHNLVLVHRDTNLQKSNQLPMNFVADKVGLKNRVEKLFSEHKINFKKMKNLLATNLDEIYKDSFESKSLRATSYIEALTAQMLKRYYPFADKQKQKDGSAVRHIQGRATSNIRKLLHVKTKVRDTNIHHGIDALLIGVTSHSWLQKISNTFRENFGVIDDKARERVKKELPLIEGVSVAELVAHIEENYNIYGEESVFYKDVFGNVRVVPFWVSKKSMVSKIHKDTIYAKKQNGIFTVREKILNKFISLKITPKTSSDEFMKKFKKEILEKMYLYKTNPKDKICAIIEQRAFEIAKLLDSLQLKDTTDKEMLSETKKYLDEFIHQDLKDYNGNVIRKVQFYQTNLTGFEIRGGLATKEKTFIGFSAILNGKKIKYKRIDVANFESMKKVDGFKVYKNDVVFFIYPDGSFKGGKIVSFLEDKKMASFSNPRFPANIGLQPHSFVTLFKGKANSHKQHSLNKAIGIIKLNLNVLGNIKSFSSMGEVDGELLEFLKGLKG

SEQ ID NO: 376 - protein, 1104 aa, synthetic construct
  REGION 1..1104: note = MG86-21 effector
MKKILSLDLGITSIGYSILEKKQNNHYTLIDYGVSMFDSPFDKDGKSKKLLHSTNTSMSNLYAKRKQRKKALAKLFEEFGLEKAHKLLQQEKQNIYKNKWQLRCDDVFTRELSVGEFFTILYFIAKHRGYKSLDTNELLEELCEELKLNCEMKSSKKDDEKGKIKQALKRVEELKQNTNKTVAQIIYELELQKQTPTFRNHDNYNYMIRREYIEDELKKLVDAQQHFFKNNKDEFFEKLKEIIIKQDESSNDLNLFANCEYYKEHKVANQYSVVADIFKMYESVANITLNKEKITKEQIKLIADDFFIKIKKGKNIADIKYKDIRKILKLSDDIKIFGKSDSYVSKGKTIHNTIIKFHFLNNLSKFDNSFIVQNLDNLEKLAEIFEVLNKEKSPKTIFEKLNGNVDEKTIIKLIRYKSGKSLNISHYAMLKFIPYFQEGLTTDEIKQKLDLNRCEDYLAYKKGIKYLHINQFEKDDNLEINNHPVKYIVSAVMRVVKHLHTLYGAFDEIKVESTRELSLDDKTRKDIQKANQEFEKKLDDIKQNSQYQQIAQEYDKNLSKYTKKILMWQEQDRVDIYSGKTIGLNEIFSNEVDIDHIVPQSIGGLSVKHNLVLVHRDTNLQKSNQLPMNFVADKVGLKNRVEKLFSEHKINFKKMKNLLATNLDEIYKDSFESKSLRATSYIEALTAQMLKRYYPFADKQKQKDGSAVRHIQGRATSNIRKLLHVKTKVRDTNIHHGIDALLIGVTSHSWLQKISNTFRENFGVIDDKARERVKKELPLIEGVSVAELVAHIEENYNIYGEESVFYKDVFGNVRVVPFWVSKKSMVSKIHKDTIYAKKQNGIFTVREKILNKFISLKITPKTSSDEFMKKFKKEILEKMYLYKTNPKDKICAIIEQRAFEIAKLLDSLQLKDTTDKEMLSETKKYLDEFIHQDLKDYNGNVIRKVQFYQTNLTGFEIRGGLATKEKTFIGFSAILNGKKIKYKRIDVANFESMKKVDGFKVYKNDVVFFIYPDGSFKGGKIVSFLEDKKMASFSNPRFPANIGLQPHSFVTLFKGKANSHKQHSLNKAIGIIKLNLNALGNIKSFSSMGEVDGELLEFLKELKG

SEQ ID NO: 377 - protein, 1122 aa, synthetic construct
  REGION 1..1122: note = MG86-22 effector
MKKILSLDLGITSIGYSVIIEEEIQRYSLLDYGVSMFDKPTDKDGNSKKLLHSQAISAKKLHQLRKERKKNLAKLFEKYNLASAAKLLGQEKKNIYIHKWQLRAKKVFEEKLSVEEIFTIFYHIAKHRGYKSLDSGDLLEELCVDLGIELEQKKEKKDDEKGKIKQALNNIESLRQEYPEKTVAQIIYDVELQKEQPVFRNHDNYNYMIRREHINDEIVTIISKQKEFGNFENIDSEAFIADLIAVIDDQKESTNDMSLFGKCEYYPKEYVAHQYSLLSDIFKMYQAVANITFNKEKIKISKEQIRLIAEDFLNKIKKGKSVKELKYKDVRKVLNLDDSIKIFNKEDSYQRAGKKVENTITKFHFVDTLFKIDKSFIEDIFSADESYALMREIFDVIHKEKSPKRIYEQLKDKVSSEAVIIDLIRYKKGSSLNISSYAMMKFLPYFEEGMTLDAIKEKLNLNRKEDYSEYKKGIKYLHISTYEKDDSLEINNHPVKYVVSAALRVVKHLHAKHGAFDEIKVESTRELSLNDKVKKEIEKVNKEREKEIEKIVSDKEYQTIAQDYGKNIHKYARKILMWEAQERFDIYSGQSIGLDDIFSNRVDIDHIIPQSLGGLYVQHNLVLVHRDENLQKSNQLPMNYIEDKEAYINRVEHLFSEHKINWKKRKNLLATNLDEIYKDTFESKDLRATSYIEALTANILKRYYPFTDEKKSADGSAVRHVQGRATSNIRKVLDVKTKSRESNIHHAVDALLIGVTNHSWLQKLSNTFRENFGKIDDEARQNIKKTLPYIDGVEVKDIVKEIEQNYNSLGEDSIFYKDIWGRVKTVSFWVSKKPMSSKAHKDTIYADKGDGIFTVRESIIAKFINLKITPTTSPEDFMKKFHKEILEKMYLYKTNPNDVICKIVEQRAEEIKELLWSFEFLDAKNKEEMQEAKAKLENLVHRELFDNNGNVIRKVKFYQTNLTGFKVRGGLATKEKTFIGFRAIKKGEKLEYERIDVSNFEKIKKSNDGSFKVYKNDIVFFIFDEENFKGGKIVSFLEDKTIASFSNPRFPAAIKFQPDSFCIIGKDSNGKPKKSSSKQYKLGKAKGIIKLKIDILGNIESYQVLGNAKSKLLDEIKSIVSH

SEQ ID NO: 378 - protein, 1138 aa, synthetic construct
  REGION 1..1138: note = MG86-23 effector
MVKYKIENLERKMSKKILSLDLGITSVGYSVLEELEKDKYSLIDYGVSMFDKPIDKDGKSKKLLHSSIKSTTKLYNLRKQRVKKLAHLFEKYNLGLATELLNQEKENRYPNKWRLRAKKVFEQKLTVGELFTILYLIAKHRGYKSLDSDDLLEELLLELGFEIEEKKSKKDDEKGKIKKALKTIEELIVKNPHKTVAQIIYEEEIIKDNPTFRNHDNYNYMIRRQHIKEEIEKIVVAQYEFGLFENDFEVKSFIKELIESIDDQKDSSNDLSLFGNCQYYPEFKVAHQYSLLSDIFKMYESVSNITLNKTKITKEQIEMVANWFFKKIEQGKNFSEIKYQDIRVVLKLSDEVKIFGKEDYYLDKKGKRVHHTITKFHFLSSLGKIDNGFIKVLFQKANSLEILDEIFDILKTEKSPKTIYSKLTDTFLRYDLIEDKKIRDETVINLIKNKSGKSLNISAYAMRKFIPYFKDGLSTDEIKEKLNLNRDENYANFKKWIKYLHIKNYEKDDNLEINNHPVKYVVSATIRVIKHLHSTYGVFDEIRVESTRELSQNEETKKAIEKANKENEKKFKEILENKEYQKIASDYGKNLKKYARKIILWEEQDKLDIYSGKVIDFDDIFSNRVDIDHIIPQSLGGLSVKHNLVLAHRDENVKKSNQLPMNFIKNKDDFVKRVEYLFSEHKINWKKRKNLLATTLDEAYQDTFESKSLRATSYIEALTAQMLKRYYPFPSKNKQRDGSAVRHIQGRATSNIRKLLGIKSKVRNTNIHHAIDAILIGLTNHSWLQKLSNTFRENIGVIDDEARAKIKKQIPIIEGIEPKELVELIESVYNIYGEESIFYKDIFGNTKSINFWVSKKPMSSKIHKDTIYAKKPNGIFTVREDIIKQFVGLKVTVKTEPKKFIESFEKKIANKIYVCKINPKDIICQIIKERAKEIELLLKSFVTLNHKDKEQISQAKEKLDTLIHKPLIDNNGNIIRKVKFYQTNLTGFDIRGGLAVTEKTFIGFKAIKGDKKIEYKRVDASNFQKIKKENDGSFKVYKNDIVFFIFSDATYKGGRVVSFLEDKKIVAFSNPRFAPNAKSQPISFVTIFKGEPYSHKQHSINKAIGIIKINLDILGNIKSYQKFGEVSKEIEAKILHME

SEQ ID NO: 379 - protein, 1126 aa, synthetic construct
  REGION 1..1126: note = MG86-24 effector
MSIATKNGHIMKKILSLDLGTTSIGYSVITEKETQKYSLLDYGVSMFDKPIDADGNSKKLLHSQALSAKKLHKLRKKRKQNLAKLFEYYRLDSAVKLLKQEYENRYIHKWQLRAKKVFEEKLSIEEIFTIFYHIAKHRGYKSLDSGDLLEELCIELGIELEQKKEKKDDEKGKIKQALNTIESLRQEYPQKTVAQIIYEVELQKEQPVFRNHDNYNYMIRREYINDEIATIIRKQKEFGNFENIDSEAFISDLIAVIDDQKESTNDMSLFGKCEYYSDEYVAHQYSLLSDIFKMYQAVANITFNKEKIKITKEQIKLIAEDFLNKIKKGKSIKELKYKDVRKVLNLDDSVKIFNKEDSYQRAGKKVEHTITKFHFVDTLSKIDKSFIEDIFNADNSYALMREIFDVVHKEKSPKRIYEQLKDKVSSEAVIIDLIRYKKGSSLNISSYAMVKFLPYFEEGMTLDTIKEKLKLNRKEDYSEYKKGIKYLHISTYEKDDSLEINNHPVKYVVSAALRVVKHLHAKYGAFEEIKVESTRELSLNDKVKKEIEKANKEREKEIEKIISNKEYQKIAQEYGKNIHKYARKILMWKAQERFDIYSGKSIGLDDIFSSRVDIDHIVPQSLGGLYVQHNLVLVHRDENLQKSNQLPMNYIEDKEAYVNRVEHLFSEHKINWKKRKNLLATNLDEIYKDTFESKDLRATSYIEALTANILKRYYPFTDEKKLADGSAVRHIQGRATSNIRKVLDVKTKNRESNIHHSVDALLIGVTNHSWLQKLSNTFRENFGKIDDEARENIKKSLPYIDGAEVKDIVKEIEEKYYSFGEDSIFYKDIWGKVKTVNFWVSKKPMSSKIHKDTIYAKKGDGIFTVRESIIAKFINLKTTPTTSPEDFMKKFQKEILEKMYLYKTNPNDVICKIIKQRAEEIKELLWSFEFLDVKNKEEMQEAKVKLESLVHRELFDNNSNVIRKVKFYQTNLTGFEVRGGLATKEKTFIGFRAIKKGEKLEYERIDVSNFEKMKKSNDGSFKVYKNDIVFFIFDEENYKGGKIVSFLDDKKMAAFSNPKYPANTQSQPESFLTMFQGKPKSHKQVSIGKAKGIIKLKVDILGNIESYQVLGDARSKILDDIKKYSE

SEQ ID NO: 380 - protein, 1128 aa, synthetic construct
  REGION 1..1128: note = MG86-25 effector
MNKKILSLDLGITSIGYSVIEEFDNDRYSLLDYGVSMFDKATDKDGNSKKILHSQSESSSKLFNLRKQRKKDLSILFDNFKLANKDKLLIQEKQNIYKNKWQLRCVKAFEQKLSINELFTIFYTIAKHRGYKSLESSDLLDELCEELNIPLEITKSNKNEDEKGKIKKSLKNVEELKQNSNKTVASIIYDIEIQKNNPTFRNHDNYNYMIRREYIEEEIINIVKSQVKFGLFESSFNSDIFIQKLKDIITYQNPSTNDMSLFGDCEFYPQFKVANQYSIISDIYKMYQSVSNITFNSKPTIKITKEQINLVANDFFTKLKKGKNILDLKYKDIRKILNLSDDIKIFNKDDDYISKGKKVHHTITKFHFINNLSKFDTNFIINNLSNENGYKNLKEIFEALQFEKDPTEIYKKLKDKIEDNQTIIYLIKYKSGNSLNISAEAMIKFIPYFKDGYTTDEIKEKLKLNRSEDYSEFKKGIKYLHINQFEKDNNNLKITNHPVKYVVSATLRVVKHLHNVYGSFDEIRVESTRELSQNEETKKAIEKANRELEKQIDTIVQNNEYQIIAKQYGKNLQKYARKILMYESQDRRDIYTGKGIEFKDIFTNTVDLDHIVPQSLGGLSVKHNFVLVHKDTNIQKSNQLPLNFVKDKEDFINRVEYLFAEHKINWKMKKNLLSNSLEETYKDTFESKSLRATSYIEALTAQVLKRYYPFKDIKKQKDGSSVRHIQGRATSNIRKILKVKTKIRDTNIHHAIDAILIGMTNQSWLKKLSDTFKNNMGVIDDKARANIKKDIPIFEIIINNEVKYLEPKELVNLIEDNYNFDGENSIFYKDIWGKTKSINFWVSKKPMVSKIHKDTIYSKKDNGIYTVRESIINHFINLKITPTTLSKKFEEEFNKKILNKMYLYKTNPNDIIYKIVQQRANDIKVLLDSFMLEDTKDKETLSILKTNLDNLIHSDLLDNNNNIIKKVKFYQTNLTGFNVRGGLATKEKTFIGFKATLENDKLNYTRIDVANIDKIKKDNDNSFKVYKNDLVFFVYPDKSYKGGKIVSFLEDKKIGAFQNPRFPATIQFQPFNFCKLGSGKKVGTKQQALAQTIGIIKLNLDILGNIKSYQKIGQCNSDILEHIKTIKG

SEQ ID NO: 381 - protein, 1144 aa, synthetic construct
  REGION 1..1144: note = MG86-26 effector
MVNLMSKKILSLDLGITSIGYSVLQEHSNDKYSLCDYGLSMFDKPLDKDGNSKKLLHSASISTTKLYALRKKRKQNLALVFENFQLASKTSLLEQEKNNQFINKWELRAKKVFEEKLEISELFTILYTLAKHRGYKSLDSGDLLEELCVELGIEIDNKGKKKEDDEKGKIKNALKTIESLREANPKKTVAQIIYEIEIQKVNPTFRNHDNYNYMIRREYINDEIKKIINTQEKFGLFSIAFNTKEFIKKIINAIDDQKDSTNDMSLFGRCQYYKEEIVAHQYSLLSDIFKMYESVANITFNAKPIVKITPKQLKLIADDFFKKIKKGKNIADIKYKDIRKILKLDDNVKIFNKEDSHFIKGKKQERSIIKFHFLNNLSKINNAFILDALEQENKYEILKKIFDVLAYEKAPHSIYEKLKEKIKDKKTIVDLIKYKAGSSMSISSYSMIQFIPHFEQGFTTDEIKKKLELDRKEDYSAFNKGIKYLHLKQFEEDDDLKINNHPVKYVVSATLRLIKYLHSVYGAFDEIRVESTRELSQNEQTKKDIEKANRALEKEIDAIVSNTEYQTIAQNYGKNLRKYARKILLWEEQERLDIYSGKVISVEDIFTNVVDLDHVVPRSLGGLSVKHNFVLAHRDTNVQKSNQLPLYFVMDKQAFINRVEYLFESHKINWKKKINLLANSLDDVYKDTFESKSLRATSYIEALTAQLLKRYYPFPDEKKQSDGSAVRHIQGRATSNIRKLLDVKMKVRDTNIHHAIDAILIGFTNQSWLQKLSNTFRENMGVIDDKARENIKKDFPIIELVINDEVKYVEPKELMELIEDNYNTFGEDSVFYKDIWGRVKTVNYWVSKKPMVSKIHKDTIYAKKGNGLYTNRENIINQFIALKITPTTNAEKFHENFEKKILKKMYLYKTNPKDVICQIVQNRAEDIATLLKSFIGVDSKNKELMSNAKSQLEALLHRELLDNNGNIIRKVKFYQTNLTGFDVRGGLATKEKTFIGFKSWLKDENLHYERIDVANIDTVKKENDSSFKVYKNDLVFFIYPDGSFRGGKIVSFLEENKTGAFQNSKFPMALKYQPSSFCEVDKQGKHTKTKPKSIGKAIGIIKLNLDIVGNIKSYQNIGNVNSECLEFLKENTDGWESSSSHKTL

SEQ ID NO: 382 - protein, 1127 aa, synthetic construct
  REGION 1..1127: note = MG86-27 effector
MSKKILSLDLGITSIGYSILEEVSENRYSLLDYGLSMFDKATDKDGNSKKLLHSSASSAKNLYTLRKERKKSLAKLFELFNFSTSLKLLNQEKENLYINKWELRAKEAFCRRLEVGELFSILYALAKHRGYKSLESGDLLEELCEELNLECNLTKKTEDEDTGKIKLALKTVESLRLDNPHKTVAQIIYEEEILKFTPTFRNHDNYNYMIRREYINDEIKKILLAQEKFGFFKSDFDVTAFIDSVIEIIDDQKESTNDLSLFGNCEYYPKHKVAHQYSFLSDIFKMYESVSNITFNTKPTLKITPSQIKLIAEDFFAKVKKGKNIGDIKYKDIRKVLKLDDDVKIFNKEDSYLRAGKKIENSIIKFHFVNSLSKIDNSFIVIALEDERGYEVLQNIFDVLAYEKSPKSIYEKLKNLVDEKTIIALIQNKHGNSLNISHYAMLQFIPYFEEGLTTDEIKKKIGLERKEDYSKYRKGIKHLNIVEFEKDENLEINNHPVKYVVSATLRVVKHLHSVYNGFDEIRVESTRELSQNEQTKKDIEKANRAQEKEFSRIVEDKEYQKIADSYGKNIKKYARKILLWEEQEYLDIYSGKVIGLGEIFSNEVDLDHIVPQSLGGLSVKHNFVLAHRDTNVQKSNRLAVDFVSDKEAFINRVEHLFSSHKINWKKRKNLLATNLDETFQDVFESKSLRATSYIEALTAQLLKCYYPFIDKKKQVDGSAVRHIQGRATSNIRKLLGVKTKVRDTNIHHAIDALLIGFTNHSWLQKLSNTFRENKGVINDEARAKIKKEFPIIELVVNDEVEYLEPKELCERIENTFNCYGEESVFYKDIWGKNRVVSFWVSKKPMVSKIHKDTIYAKKKEGIFTVRENIINKFIGLKITPTMSSQKFMDIFKKNILEKMYLFKVNPKDFISLVIQKRADEIAELLESFETLDKKDKESMSQAKVDLEVLIHKEILDNSENSIRKVKFFQTNLTGFDVRGGLATKEKTFIGFRAWLEDDKLHYVRIDVANFKKIQKLNDSSFKVYKNDEIFFIMPDGSRRGGKIVSFLEETKKSAFQNAKYPTSSEYQPMQFCKMDKGKKSGAKQQSIGKAIGIIKLNIDIIGNIKSYQVIGNAESELLDFVKETVHG

SEQ ID NO: 383 - protein, 1137 aa, synthetic construct
  REGION 1..1137: note = MG86-28 effector
MKKILSLDLGITSMAYSIIEEFENDRYSLVDYGVSMFDKPTDKDGNSKKLLHSASTSTKNLYNLRKKRKQNLAKLFENFNLSTKSRLLNQEKQNLYINKWELRAKKAFDERLDTTELFSIFYALAKHRGYKSLDSGDLLEELYEKLGIDFQAKKEKDKSKADEKGKIKSALSTIENLRLEHPQKTVAQIIYEVELQKKNPTFRNHDNYNYMIRREYINDEIKKIILSQKEFGFFSDGFNVEEFSKRVVETIDDQKDSTSDMSLFGFCEYYKDKEQRVTHQYSLLSDIYKMYESVSNITFNSKPSIKITPQQIKLIANDFFTKVKKGKNILDIKYKDIRKILNLDDNFKIFNKDDTYLNRGKKQEHIIIKFHFVNTLSKINNQFILDIFEQENKYELLKDIFDVLCFEKAPHAIYEQLKEKIKDEKTIVDLIKYKSGNSLNISHYAMLKFIPYFEQGLTADAIKKKLGLNRKENYSAFKKGIKYLHINKFEEDDNLKINNHPVKYVVSSTLRVIKHLHSVYGAFDEIRVESTRELSQNEQTKKDIEKANRAFEKELDIIIEDVEYQKIAEQYGKNLRKYARKILIYKEQERRDIYTGEGIELKDIFTNVVDLDHIVPKSLGGLSVKHNLVLAHRDSNVRKSNQLPLYFVKDKQSFINRVEYLFEHHKINWKKKKNLLASALDETFQDTFESKSLRATSYIEALTAQVLKRYYPFPNKKKQSDGSAVRHIQGRATSNIRKLLGVKTKVRDTNIHHAIDAILIGFTNQSWLQKLSNTFRENMGLIDDEARANIKKEMPIVELIVNDKVEYLKPKELCQRVEESYSEFGEDSVFYRDVWGEVKVVNFWVSKKPMVSKIHKDTIYSKKQDGIFTVRESIINKFILLKITPTTPSQKFIENFQKNILKKMYLFKTNPKDIICQIVQNRAKSIATLLDTFKDIDSKNKELMSDAKTKLEELIHKDLVDNNGNTIRKVKFYQSALTGFDIRGGLATKEKTFIGFRAWLESDKLQYERIDVANFDTIKKKFDNSFRVFKNDVVFFVYPDGSFRGGKIVSFLDDKGIASFSNPKYPSLSEHQPKSFCKMGKDNNGNPKKSGAKQQNINASIGLIKLSLDIIGNIKSYQVTGNAESELLRFIKDVKNG

SEQ ID NO: 384 - protein, 1107 aa, synthetic construct
  REGION 1..1107: note = MG86-29 effector
MNILSLDLGITSIGYSILEKKENNRYSLIDYGVSMFDAPFDKDGKSKKLLHSTNTSMSNLYAKRKQRKKALANLFEKFGLAKAQKLLQQEKQNIYKNKWQLRCKDVFERKLNIGEFFTILYFIAKHRGYKSLDTNELLEELCEELKLDCGLKSSQKDDEKGKIKQALKRVEELKQNTNKTVAQIIYEIESKKQTPTFRNHDNYNYMIRREYIEDELKKLVESQVKFGLFGNTFDKEKFINELKEIIVKQKESSNDLNLFANCEYYKEHKVANQYSVVADIFKMYESVINIKLNKEKITKEQIQLIADDFFTKIKKGKNIPDIKYKDIRKILKLSDDIKIFDKKDSYVRKGKTIHHTITKFHFLNNLSKFDNSFIVENLKNLENLAEIFEVLNKEKSPKTIFEQLKGKVDEKTIIELIKYKNGKSLNISHYAMLKFIPYFQEGLTTDEIKKKLDLNRNEDYSKYKKGIKYLHVNQFEKDDNLEINNHPVKYIVSAVMRVVKHLHTLYGPFDEIKVESTRELSLPKKVKDKIDKVNKDNEAKYLAVLKNEAYLSAAKYHNKNIQKYKEQLVLYEEQEGRDIYTWQGIEIDDIFKDKLEVDHIVPQSLGGLSVKHNKVLCFKNSNATKGNRLPMNYIKDTESFRKNIEYLYTKKVINGKKLKNLLATNLDEIYKDTFESKSLRATSYVEALTAQMLKRYYPFADKQKQKDGNAVMYIQGRATANIRKLLHVKAKTRGTNIHHAIDALIIGVTSHSWLKKISNTFRENYGVIDDKARENIKKELPLIEGVSVAELVAHIEENYNFDGEESVFYRDIFGNVKVVPFWVSKKSMVSKIHKDTIYAKKPDGIFTVREKILDKFIALKITPTTSPDEFMKKFQKEILEKMYLYKTNPKDKICQIIQQRAFDIAQLLDNLQLEDTTDKEMLSETKKYLDEFIHQDLKDHNSNVIRKVQFYQTNLTGFEIRGGLATKEKTFIGFSATLNGDKIEYKRIDVANFETIKKDAGFKVYKNDIVFFIYPDGSFKGGKIVSFLEEKNVASFSNLRYPANINLQPHSFVTLFKGKANSHKQHSINKAIGIIKLHLDIIGNIKSFSSLGEVDSELLSFLKKLKD

SEQ ID NO: 385 - protein, 1116 aa, synthetic construct
  REGION 1..1116: note = MG86-30 effector
MKQILSLDLGITSVGYSVIQEHETDKYSLIDYGVSMFDKPTDKDGNSKKLLHSQALSAKNLHKLRKKRKQNLASLFEKYHLDNRERLLQQEKDNLYKNKWELRAKKVFEKQLSIGEIFTILYHIAKHRGYKSLDSGDLLEELCETLGIETETTKPKKDDERGQIKQALKSVEALREEYPQKTVAQIIYELESKKENPIFRNHDNYNYMIRREYINDEIRKIIKVQIAFGAFRTIDDAFINDVIAVIDDQKESTNDLSLFGKCEYYPEYYVAHQYSLLSDIFKMYQAVANITFNKEKIKITKEQIALIAEDFLGKIKKGKSVKDIKYKDIRKVLKLDDDIKIFNKDDSYLNKGKKQENTITKFHFVDILSKIDKSFVEDIFASDKSYTIMREIFDVLHYEKSPKLIYKQLKNKISDEQVIIDLIRNKKGNSLNISSFAMLQLLPYLKEGLTLDEVKQKLGLQRQEDYAEYKKGIKYLHITNYEKDDELEINNHPVKYAVSAALRVVKHLHTEYGTFDEIKVESTRELSLGEKARKEIEKANKAFEKEIEQIVENVEYQKIAKSYGKNLRKYARKILMWEEQERLDIYSGKSIGITDIFSNSVDLDHIVPQSLGGLSVKHNFVLVHRDENLQKSNQLPMNYIKDTQAYTNRVEHLLREHKINWKKAKNLLATNLDEVFKDRFESKSLRATSYIEALTAQMLKRYYPFKDVRKLKDGSAVRHLQGRATSNIRKVLGVKTKSRETNIHHAIDALLIGVTSHSWLQKLSNTFRENFGCIDDEARKNIKKALPYMDGLEIKDLVKEIEEQYNSFGEDSIFYRNIWGKVKTVNFWVSKKPMSSKVHKDTIYAKKGDGIYTVRENIIAKFIGLKVIPTTSPEEFMKRFHKNILQKMYLFKTNPHDVICKLVEQRGEEIKELLWSFEFLDVKNKEEMSEAKTKLELLIHKDLLDNNGNVIRKVKFYQTNLTGFDVRGGLATKEKTFIGFRAYKENEKLEYERIDIANIEKIQKVNDGSFKAYKNDVVLFIFDDKVYKGGKIVSFLEEKKMAAFSNPKYPANIQSQPESFLTMFNGKANSHKQVSISKAKGIIKLYIDILGNIKSYQVLGNAKSKILDEIKSIVSH

SEQ ID NO: 386 - protein, 994 aa, synthetic construct
  REGION 1..994: note = MG86-31 effector
METLRKEYPEKTVARIIYEIEIQKPNPTFRNHDNYNYMIRREYIREEIEKIVLSQMDFGLFAKTFDVDTFIKELISTIDDQKDSTNDLSLFGNCEYYPEEKVAHQYSLLSDIFKMYQSVTNITFGKTKISKEQIKIISDDFFKKIKQSKNIADIKYQDIRKLLKLKDEVQIFGKEDYRLDKKGKKVHYTITKFHFLANLGKIDNSFMDAVFEKKNKYEILKEIFDVLEFEKAPKSMYTQINAVFMKYTLVEDERLKDETIINLIKYKTGSSLNISAHAMIKFIPYFEKGMTLDEIKKELNIKNFEDYSEFKKGIKYLGLGIDKKLFVTVEARDRIKKYPASQFEFDNQLIINNHPVKYVVSATMRLVKHLHVTYGAFDEIRVESTRELSQNEETKKAIDKANRENEAKFQKIIEDEEYQKIAKHYNKNLKRYARKIMLWEEQDKIDIYSGKVICFEDIFTNVVDIDHIIPESLGGLSVKHNLVLAHRDENVKKSNQLPMNFVTDKVAYVNRIEHLYKEYKINWKKKINLLAETLDDSYKDTFESKSLRSTSYIEALTAQMLKRYYPFPDKKKQVNGQAVAHVQGRATSNIRKLLGVKIKVRDTNIHHAIDAILIGLTSKSWLQKLSNTFRENMGVIDDEARAKINKELPLIEGVEPKELVELIEDAYNVYGEDSVFYKDIFGKTKAVNFWVSKKSDTSSLHKETIYGIDKIKGKIKDKQYTGLTTLRIDIIKRLKDAQKKPTLPKIGDDAHMFLNEYQEELIKKLYVYQYNQEDKILAIIQAKASDIAKCLEKYSDIKNENKDLFSKAKEELSCIIDKPLVDYNGNIIRKVKIIVSNKEKEPMIRGGTTVAERIAIGFSVYTLEKDKLLFRRIDLKDKLSKSLTKVNASSSMNIFRNDLIYIIFKKSEKNLVGYLESFDDKTNKIRLYDARFPKRLELQPKKYKVSSGKSRKEFGVGSAMGFIKINLDILGNIKSHTRFGEVSKEVEAQIFHKE

SEQ ID NO: 387 - protein, 1129 aa, synthetic construct
  REGION 1..1129: note = MG86-32 effector
MKKLLSINLGITSIGYSVLNELDNDKYSLIDYGVNMFDTPYDKDGNSKKLIHSQIKSTKKLYELRKERKKNLSKLFEDFGFAKKEDFLNQEKENLFINKWGLRAKKAFEEKLTFQELFSILYLIAKHRGYKSLDTDDLLEEFCEKLGLNQEKKKDNGKDNEKGKIKQALKTIETLKLQFPQKTIPQIIYEVEIQKENPTFRNHDNYNYMIRREYINEEIKALVLSQEKFGLFDKNFDSKAFIEKLIETIDDQKESSNDLSLFGNCEYLKNEKVAHQYSLLGDIYKMYQSVANITFNSNPTIKISKEQIKLIANDFFDKLKNGKNISDIKYKEIRKILKLSDDFKIFNKEDSYKSKDKTQENSITKFHFVNNLSKFDKDFIKSILEKSNKYDILKEVFDVLRDEKQPKPIYDKLNNIFSKYDLIKNESIKNNTILELIKNKTGSSLSISHQAMINIIPYFEDGSTIDEIKQKLNLSREEDYLSYKKGIKYLSVAQFENNNNLPINNHPVKYVVSAALRLIKHLHVTYGAFDEIRVESTRELSLNDESKRNIDKVNRENEAKITAILENIEYQQIAQTYGKKLEKYARKILIWDEQERFDIYNGKSIGFGDIFSNSVDIDHIVPQSLGGLSVKHNLVLVHRDTNLQKLNQLPLNFIADKQGFIDRIEYLFKEHKISWKKRKNLLATNLDDTYKDTFESKSLRATSYIEALTAQILKSYYPFPNQTKNSMEVRHIQGRTTSNIRKLLKVKTKIRNTNIHHAIDAILIGLTNQSWLQELSNTFRENMGVIDDVARQNIKKVIPLIEGIEPKELIEMIENNYNAYGEDSIFYKDIFGKTKAVNFWVSKKPMVSKIHKDTIYSKKPNDFYTVKENILNQFIALKVNNDTKANKFYEDFKKNILEKMYVYKTNPNDVICKIVQNRAYDIKELLTSFETIDKKDKEALSEAKQKLDTLIHNPLLDNNNKPIRKVKFYQTNLTGFNIRGGLATKEKTFIGFKASLKNDKLFYERIDVANKNNIKDNDFLIIRNNLICINFKNKNLLGFVESFDENTNKIRMYDSRYPKRLENQPERFKVASGKGRKEFGIAGAIGIIKLNLDILGNINSYQIIGTIQNELYSFFKKLKNDKGNLPINT

SEQ ID NO: 388 - protein, 1129 aa, synthetic construct
  REGION 1..1129: note = MG86-33 effector
MKKLLSINLGITSIGYSVLNELDNDKYSLIDYGVNMFDTPYDKDGNSKKLIHSQIKSTKKLYELRKERKKNLSKLFEDFGFAKKEDFLNQEKENLFINKWGLRAKKAFEEKLTFQELFSILYLIAKHRGYKSLDTDDLLEEFCEKLGLNQEKKKDNGKDNEKGKIKQALKTIETLKLQFPQKTIPQIIYEVEIQKENPTFRNHDNYNYMIRREYINEEIKALVLSQEKFGLFDKNFNSNAFIEKLIETIDDQKESSNDLSLFGNCEYLKNEKVAHQYSLLGDIYKMYQSVANITFNSNPTIKISKEQIKLIANDFFDKLKNGKNISDIKYKEIRKILKLSDDFKIFNKEDSYKSKDKTQENSITKFHFVNNLSKFDKDFIKSILEKSNKYDILKEVFDVLRDEKQPKPIYDKLNNIFSKYDLIKNESIKNNTILELIKNKTGSSLSISHQAMINIIPYFEDGSTIDEIKQKLNLSREEDYLSYKKGIKYLSVAQFENNNNLPINNHPVKYVVSAALRLIKHLHVTYGAFDEIRVESTRELSLNDESKRNIDKVNRENEAKITAILENIEYQQIAQTYGKKLEKYARKILIWDEQERFDIYNGKSIGFGDIFSNSVDIDHIVPQSLGGLSVKHNLVLVHRDTNLQKLNQLPLNFIADKQGFIDRIEYLFKEHKISWKKRKNLLATNLDDTYKDTFESKSLRATSYIEALTAQILKSYYPFPNQTKNSMEVRHIQGRTTSNIRKLLKVKTKIRNTNIHHAIDAILIGLTNQSWLQELSNTFRENMGVIDDVARQNIKKVIPLIEGIEPKELIEMIENNYNAYGEDSIFYKDIFGKTKAVNFWVSKKPMVSKIHKDTIYSKKPNDFYTVKENILNQFIALKVNNDTKANKFYEDFKKNILEKMYVYKTNPNDVICKIVQNRAYDIKELLTSFETIDKKDKEALSEAKQKLDTLIHNPLLDNNNKPIRKVKFYQTNLTGFNIRGGLATKEKTFIGFKASLKNDKLFYERIDVANKNNIKDNDFLIIRNNLICINFKNKNLLGFVESFDENTNKIRMYDSRYPKRLENQPERFKVASGKGRKEFGIAGAIGIIKLNLDILGNINSYQIIGTIQNELYSFFKKLKNDKGNLPINT

SEQ ID NO: 389 - protein, 1129 aa, synthetic construct
  REGION 1..1129: note = MG86-34 effector
MKKLLSINLGITSIGYSVLNELDNDKYSLIDYGVNMFDTPYDKDGNSKKLIHSQIKSTKKLYELRKERKKNLSKLFEDFGFAKKEDFLNQEKENLFINKWGLRAKKAFEEKLTFQELFSILYLIAKHRGYKSLDTDDLLEEFCEKLGLNQEKKKDNGKDNEKGKIKQALKTIETLKLQFPQKTIPQIIYEVEIQKENPTFRNHDNYNYMIRREYINEEIKALVLSQEKFGLFDKNFDSKAFIEKLIETIDDQKESSNDLSLFGNCEYLKNEKVAHQYSLLGDIYKMYQSVANITFNSNPTIKISKEQIKLIANDFFDKLKNGKNISDIKYKEIRKILKLSDDFKIFNKEDSYKSKDKTQENSITKFHFVNNLSKFDKDFIKSILEKSNKYDILKEVFDVLRDEKQPKPIYDKLNNIFSKYDLIKNESIKNNTILELIKNKTGSSLSISHQAMINIIPYFEDGSTIDEIKQKLNLSREEDYLSYKKGIKYLSVAQFENNNNLPINNHPVKYVVSAALRLIKHLHVTYGAFDEIRVESTRELSLNDESKRNIDKVNRENEAKITAILENIEYQQIAQTYGKKLEKYARKILIWDEQERFDIYNGKSIGFGDIFSNSVDIDHIVPQSLDGLSVKHNLVLVHRDTNLQKLNQLPLNFIADKQGFIDRIEYLFKEHKISWKKRKNLLATNLDDTYKDTFESKSLRATSYIEALTAQILKSYYPFPNQTKNSMEVRHIQGRTTSNIRKLLKVKTKIRNTNIHHAIDAILIGLTNQSWLQELSNTFRENMGVIDDVARQNIKKVIPLIEGIEPKELIEMIENNYNAYGEDSIFYKDIFGKTKAVNFWVSKKPMVSKIHKDTIYSKKPNDFYTVKENILNQFIALKVNNDTKANKFYEDFKKNILEKMYVYKTNPNDVICKIVQNRAYDIKELLTSFETIDKKDKEALSEAKQKLDTLIHNPLLDNNNKPIRKVKFYQTNLTGFNIRGGLATKEKTFIGFKASLKNDKLFYERIDVANKNNIKDNDFLIIRNNLICINFKNKNLLGFVESFDENTNKIRMYDSRYPKRLENQPERFKVASGKGRKEFGIAGAIGIIKLNLDILGNINSYQIIGTIQNELYSFFKKLKNDKGNLPINT

SEQ ID NO: 390 - protein, 1125 aa, synthetic construct
  REGION 1..1125: note = MG86-35 effector
MKKILSLDLGITSIGYSIIDELGNNNFSLINYGVFMLDTPYSNDEKRISKKTIHSQVIAIKKLYKLKKERKQNLAKLFEEYNFGRKDDFLNQEKKNLFINKWELRAKKAFNEKLSFQEFFSILYLIAKHRGYKSLDTDDLLEEFCEKLGLNQEVKKEKTVDERGKIKQALKTIETLKLQFPHKTIPQIIYEVEIQKDNPTFRNHDNYNYMIRREYINEEIKTLVLSQEKFGLFDKNFDSKAFIEKLIKTIDDQKESSNDLSLFGNCEYFKNEKVAHQYSLLADIYKMYQSIANITFNSNPTIKISKDQIKLIANDFFDKLKNGKNITDIKYKEVRKILKLSDDFKIFNKEDSYKSKDKTQENSITKFHFVNNLSKFDKDFIKNILEKSNKYEILKEIFDVLRDEKQPKPIYDKLNTIFLKYDLINDKSTKNNTILELIKNKTGSSLSISHQAMINIIPYFEDGFTIDEIKQKLNLNREEDYLSFKKGIKYLSVAQFENDTNLLVNNHPVKYVVSAVFRLIKHLHTTYGAFDEIRVVSNEELQLNQKAIKNIHKKKIEKDKKTKAILENINYQQIANSFDKNIEDYVKRILLWEEQNGIDIYTGKIINIEDIFSKNVDITYIIPKSLGGLNSNHNLVLVYINKDNKISNQLPINYILDKQEFINRIEYLFNEYKISWKKRRNLLTTNLDEIYENSFKIENKIASSYIEFLTSDILKRYYPFNSHINVTHSQIKIILNIRKFLNIKSKIPNTNIYHAINAILMGISDKVWMQKLCNTFKNNLGLKENLSEQNIKRFNPFIQGIEVKKFMEMIEYNYNSFGEESIFYKDIFGKLKVVKFWVSKKALVSKIHVNNIYSKKPDGYFTARGIKNINEHFIELKISPNTKAEDFYEKFKNNILEKMYVYKTNPNDIICKIVKDRAYEIKNLLISFEYINKNDSDIYIKAQQQLNNLICSPILDNNNKPIRKVKFYRTNLTGFNVRGGLATKEKTFIGFKVKLDNYKLVYERIDLSNYEIIKTQKDNSFRVYKNDMIFFIFPDNTYKGGKISSFLENKQIASFLNPRFPSLSQYQPDAFCRFDKNKKCGAKQHLLSKAIGIIKLDLDILGNINSLQTIGRVESRLYNLLKSRK

SEQ ID NO: 391 - protein, 729 aa, synthetic construct
  REGION 1..729: note = MG86-36 effector
MVHLFTGIYVRKLSNIFSKYDLIKNESIKNNTILELIKNKTGSSLSISHQAMINIIPYFEDGSTIDEIKQKLNLSREEDYLSYKKGIKYLSVAQFENNNNLPINNHPVKYVVSAALRLIKHLHVTYGAFDEIRVESTRELSLNDESKRNIDKVNRENEAKITAILENIEYQQIAQTYGKKLEKYARKILIWDEQERFDIYNGKSIGFGDIFSNSVDIDHIVPQSLGGLSVKHNLVLVHRDTNLQKLNQLPLNFIADKQGFIDRIEYLFKEHKISWKKRKNLLATNLDDTYKDTFESKSLRATSYIEALTAQILKSYYPFPNQTKNSMEVRHIQGRTTSNIRKLLKVKTKIRNTNIHHAIDAILIGLTNQSWLQELSNTFRENMGVIDDVARQNIKKVIPLIEGIEPKELIEMIENNYNAYGEDSIFYKDIFGKTKAVNFWVSKKPMVSKIHKDTIYSKKPNDFYTVKENILNQFIALKVNNDTKANKFYEDFKKNILEKMYVYKTNPNDVICKIVQNRAYDIKELLTSFETIDKKDKEALSEAKQKLDTLIHNPLLDNNNKPIRKVKFYQTNLTGFNIRGGLATKEKTFIGFKASLKNDKLFYERIDVANKNNIKDNDFLIIRNNLICINFKNKNLLGFVESFDENTNKIRMYDSRYPKRLENQPERFKVASGKGRKEFGIAGAIGIIKLNLDILGNINSYQIIGTIQNELYSFFKKLKNDKGNLPINT

SEQ ID NO: 392 - protein, 230 aa, synthetic construct
  REGION 1..230: note = MG86-37 effector
MYVYKTNPNDVICKIVQNRAYDIKELLTSFETIDKKDKEALSEAKQKLDTLIHNPLLDNNNKPIRKVKFYQTNLTGFNIRGGLATKEKTFIGFKASLKNDKLFYERIDVANKNNIKDNDFLIIRNNLICINFKNKNLLGFVESFYENTNKIRMYDSRYPKRLENQPERFKVASGKGRKEFGIAGAIGIIKLNLDILGNINSYQIIGTIQNELYSFFKKLKNDKGNLPINT

SEQ ID NO: 393 - protein, 1129 aa, synthetic construct
  REGION 1..1129: note = MG86-38 effector
MKKLLSINLGITSIGYSVLNEQDNDKYSLIDYGVNMFDTPYDKDGNSKKLIHSQIKSTKKLYELRKERKKNLSKLFEDFGFAKKEDFLNQEKENLFINKWGLRAKKAFEEKLTFQELFSILYLIAKHRGYKSLDTDDLLEEFCEKLGLNQEKKKDNGKDNEKGKIKQALKTIETLKLQFPQKTIPQIIYEVEIQKENPTFRNHDNYNYMIRREYINEEIKALVLSQEKFGLFDKNFDSKAFIEKLIETIDDQKESSNDLSLFGNCEYLKNEKVAHQYSLLGDIYKMYQSVANITFNSNPTIKISKEQIKLIANDFFDKLKNGKNISDIKYKEIRKILKLSDDFKVFNKEDSYKSKDKTQENSITKFHFVNNLSKFDKDFIKSILEKSNKYDILKEVFDVLRDEKQPKPIYDKLNNIFSKYDLIKNESIKNNTILELIKNKTGSSLSISHQAMINIIPYFEDGSTIDEIKQKLNLSREEDYLSYKKGIKYLSVAQFENNNNLPINNHPVKYVVSAALRLIKHLHVTYGAFDEIRVESTRELSLNDESKRNIDKVNRENEAKITAILENIEYQQIAQTYGKKLEKYARKILIWDEQERFDIYNGKSIGFGDIFSNSVDIDHIVPQSLGGLSVKHNLVLVHRDTNLQKLNQLPLNFIADKQGFIDRIEYLFKEHKISWKKRKNLLATNLDDTYKDTFESKSLRATSYIEALTAQILKSYYPFPNQTKNSMEVRHIQGRTTSNIRKLLKVKTKIRNTNIHHAIDAILIGLTNQSWLQELSNTFRENMGVIDDVARQNIKKVIPLIEGIEPKELIEMIENNYNAYGEDSIFYKDIFGKTKAVNFWVSKKPMVSKIHKDTIYSKKPNDFYTVKENILNQFIALKVNNDTKANKFYEDFKKNILEKMYVYKTNPNDVICKIVQNRAYDIKELLTSFETIDKKDKEALSEAKQKLDTLIHNPLLDNNNKPIRKVKFYQTNLTGFNIRGGLATKEKTFIGFKASLKNDKLFYERIDVANKNNIKDNDFLIIRNNLICINFKNKNLLGFVESFDENTNKIRMYDSRYPKRLENQPERFKVASGKGRKEFGIAGAIGIIKLNLDILGNINSYQIIGTIQNELYSFFKKLKNDKGNLPINT

SEQ ID NO: 394 - protein, 753 aa, synthetic construct
  REGION 1..753: note = MG86-39 effector
MSSVLLLKNLGIRFGGLKAVSDVLRDEKQPKPIYDKLNNIFSKYDLIKNESIKNNTILELIKNKTGSSLSISHQAMINIIPYFEDGSTIDEIKQKLNLSREEDYLSYKKGIKYLSVAQFENNNNLPINNHPVKYVVSAALRLIKHLHVTYGAFDEIRVESTRELSLNDESKRNIDKVNRENEAKITAILENIEYQQIAQTYGKKLEKYARKILIWDEQERFDIYNGKSIGFGDIFSNSVDIDHIVPQSLGGLSVKHNLVLVHRDTNLQKLNQLPLNFIADKQGFIDRIEYLFKEHKISWKKRKNLLATNLDDTYKDTFESKSLRATSYIEALTAQILKSYYPFPNQTKNSMEVRHIQGRTTSNIRKLLKVKTKIRNTNIHHAIDAILIGLTNQSWLQELSNTFRENMGVIDDVARQNIKKVIPLIEGIEPKELIEMIENNYNAYGEDSIFYKDIFGKTKAVNFWVSKKPMVSKIHKDTIYSKKPNDFYTVKENILNQFIALKVNNDTKANKFYEDFKKNILEKMYVYKTNPNDVICKIVQNRAYDIKELLTSFETIDKKDKEALSEAKQKLDTLIHNPLLDNNNKPIRKVKFYQTNLTGFNIRGGLATKEKTFIGFKASLKNDKLFYERIDVANKNNIKDNDFLIIRNNLICINFKNKNLLGFVESFDENTNKIRMYDSRYPKRLENQPERFKVASGKGRKEFGIAGAIGIIKLNLDILGNINSYQIIGTIQNELYSFFKKLKNDKGNLPINT

SEQ ID NO: 395 - protein, 1129 aa, synthetic construct
  REGION 1..1129: note = MG86-40 effector
MKKLLSINLGITSIGDSVLNELDHDKYSLIDYGVNMFDTPYDKDGNSKKLIHSQIKSTKKLYELRKERKKNLSKLFEDFGFAKKEDFLNQEKENLFINKWGLRAKKAFEEKLTFQELFSILYLIAKHRGYKSLDTDDLLEEFCEKLGLNQEKKKDNGKDNEKGKIKQALKTIETLKLQFPQKTIPQIIYEVEIQKENPTFRNHDNYNYMIRREYINEEIKALVLSQEKFGLFDKNFDSKAFIEKLIETIDDQKESSNDLSLFGNCEYLKNEKVAHQYSLLGDIYKMYQSVANITFNSNPTIKISKEQIKLIANDFFDKLKNGKNISDIKYKEIRKILKLSDDFKIFNKEDSYKSKDKTQENSITKFHFVNNLSKFDKDFIKSILEKSNKYDILKEVFDVLRDEKQPKPIYDKLNNIFSKYDLIKNESIKNNTILELIKNKTGSSLSISHQAMINIIPYFEDGSTIDEIKQKLNLSREEDYLSYKKGIKYLSVAQFENNNNLPINNHPVKYVVSAALRLIKHLHVTYGAFDEIRVESTRELSLNDESKRNIDKVNRENEAKITAILENIEYQQIAQTYGKKLEKYARKILIWDEQERFDIYNGKSIGFGDIFSNSVDIDHIVPQSLGGLSVKHNLVLVHRDTNLQKLNQLPLNYIADKQGFIDRIEYLFKEHKISWKKRKNLLATNLDDTYKDTFESKSLRATSYIEALTAQILKSYYPFPNQTKNSMEVRHIQGRTTSNIRKLLKVKTKIRNTNIHHAIDAILIGLTNQSWLQELSNTFRENMGVIDDVARQNIKKVIPLIEGIEPKELIEMIENNYNAYGEDSIFYKDIFGKTKAVNFWVSKKPMVSKIHKDTIYSKKPNDFYTVKENILNQFIALKVNNDTKANKFYEDFKKNILEKMYVYKTNPNDVICKIVQNRAYDITALLTSFETIDKKDKEALSEAKQKLDTLIHNPLLDNNNKPIRKVKFYQTNLTGFNIRGGLATKEKTFIGFKASLKNDKLFYERIDVANKNNIKDNDFLIIRNNLICINFKNKNLLGFVESFDENTNKIRMYDSRYPKRLENQPERFKVASGKGRKEFGIAGAIGIIKLNLDILGNINSYQIIGTIQNELYSFFKKLKNDKGNLPINT

SEQ ID NO: 396 - protein, 1109 aa, synthetic construct
  REGION 1..1109: note = MG86-41 effector
MSKKILSLDLGITSIGYSVLEELENDRYSLVDYGVSMFDKATDKDGNSKKLLHSASSSTANLFDLRKRRKKTLAQLFEEFDFGEKEYFLYQEKQNIYKNKWELRAKKAYEEKLKLEELFTILYTLAKHRGYKSLDSDDLLEELCLELKIPLDEKQTKKADDEKGQIKKALLTIEELRENSSKTVAQIIYDLEMTKNNPTFRNHDNYKYMIRREYIDEEIEKIISSQMKFGLFGSGFDSDDFIQKLKKIITWQNPSTNNMDLFGNCEYYPQDKVAHQYSIISDIYKMYQSVSNINFNKEKTPITKEQIKIIADDFFTKIKKGKNIPDIKYKDIRKLLKLDDTVKIFNKDDEKLTITKFHFLSNLSKINNSFIVDALEKENGYEELKDIFEVLQFSKDPKDIYEQLKNKIDDNQTIINLIKNKTGNSLNLSANAMIKFIPYFEGGLKTKDILKELKLNECENYGKFKKGLKYLNLSQYEKDDIDLKINNHPVKYVVSATLRVIKHLHTTYGVFDEVKVESTRELSQNEETRKEIDKANRALEKKIDDIVANKEYQKIAEHYDKNLRKYARKILMYEEQNRRDIYTGEGIEFKEIFTNAVDLDHIIPQSLGGLSVKHNFVLVHRDSNMQKSNQLPMNFIKDKQDFKNRVEELFKEHKINWKKKINLLATNLDETFKDTFESKSLRATSYIEALTAQILKRYYPFINQEHQKNGISVSHIQGRATSNIRKLLKVKTKIRDTNIHHAIDAILIGLTNPSWLQKLSNTFRENMGVIDDIARENIKREIPLIEGIEPKELVEMIEDRYNEFGEDSVFYKDIWGKTKAVNFWVSKKPMVSKIHKDTIYSKKEDGIYTVRENIINNFINLKTTITTSSIKFEESFKKSILNKMYLYKTNPNDVICKVIQQRAEDIKILLKSFIDIDTKDKEQLSEAKQKLENLLHKDIIDNNKNIVRKVKFYQTNLTGFDIRGGLATKEKTFIGFKAELENDKLNYKRIDVANRDTMQKEDNNSFSLKVFKNDLVFFIYPEGSFRGGKIVSFLNDKNLGAFQNSRFPTSLKYQPDSYCKDKAHTGAKQHSLNKAIGIIKLNLDILGNIKSYQKTGQCESELLNFIKAV

SEQ ID NO: 397 - protein, 1128 aa, synthetic construct
  REGION 1..1128: note = MG86-42 effector
MSKKILSLDLGITSIGYSVLEEMANDRYSLLDYGVSMFDKPTDKDGNSKKLLHSASASTSNLYDLRKQRKRNLAQLFEDFKLSTKSLLLNQEKQNIYVNKWELRAKKAFEEKLEVGELFSIFYALAKHRGYKSLDSGDLLDELCIELGINIETSKATNEDEEKGKIKSALKTIENLRKENPEKTVAQIIYETEIKKENPTFRNHDNYNYMIRREYINDEINKIVKSQESFGFFENSFNVEAFVSRIIKTVDDQKDSTNDLTLFGNCEYYKDEKVAHQYSLLSDIFKMYQSVSNITFNSKPTIKITKEQIKLVADDFFKKIAKGKSIADIKYKDVRKILNLSDDIKIFNKEDSATSKGKKQENSIIKFHFVSYLSKIDNSFILNAFEKENRYEILKEIFDVLEFEKAPRSIYKVLKDKVDEKTIIDLIRYKSGNSLSVSHRAMIDFIPFFEQGFSIDEIKEKLELNRKEDYSEFKKGIKHLHVNNFEKDDNLQINNHPVKYVVSATLRVIKHLHTVYGAFDEIRVESTRELSQNEETKKEIEKANRALEKELDAIVADAEYQKIAQQYGKNLGKYARKILMYKEQEGRDIYSGAGIELKDIFTNAVDLDHIVPQSLGGLSVKHNFVLAHRDTNVQKSNRLPLNFVADKQAFINRVEYLFEHHKINWKKKINLLATNLDETFQDRFESKSLRATSYIEALTAQTLKRYYPFPNEKKQNDGSAVRHIQGRATSNIRKLLHVKTKVRDTNIHHAIDAILIGLTNKSWLQKLSNTFRENMGVIDDEARAKIKKEMPIFELIVDDEVFYLEPKELIEKIEDSYNEFGEDSVFYKDVWGKMKVVNFWVSKKPMVSKIHKDTIYAKKPNNIYTVRESVINKFVGLKTTTATSPDKFMESFEKEILKKTYLYKTNPKDVICQIVQKRAQEIATLLSGFTDLDKKDKEVMSEAKAKLDELTHSDMIDNNGNAIRKVKFYQTNLTGFEIRGGLATKEKTFIGFKSLLMDEKLRYERIDVANIDKIKKENEAGFQVFKNDVVFFAYPDGSFRGGKIVSFLDDKNIASFSNSRFPASIGLQPHSFLTLFNGKANSHKQQSLNKAIGIIKLNLDIIGNIKSYSCVGNAESELLSFIKEAING

SEQ ID NO: 398 - protein, 1119 aa, synthetic construct
  REGION 1..1119: note = MG86-43 effector
MKQILSLDLGITSVGYSVIQEHETDKYSLIDYGVSMFDKPTDKDGNSKKLLHSQALSAKNLHKLRKKRKQNLASLFEKYHLDNRERLLQQEKDNLYKNKWELRAKKVFEEQLSIGEIFTILYHIAKHRGYKSLDSGDLLEELCETLGIETETTKPKKDDERGQIKQALKSVEALREEYPQKTVAQIIYELESKKENPIFRNHDNYNYMIRREYINDEIRKIIKVQIAFGAFRTIDDAFINDVIAVIDDQKESTNDLSLFGKCEYYPEYYVAHQYSLLSDIFKMYQAVANITFNKEKIKITKEQIALIAEDFLGKIKKGKSVKDIKYKDIRKVLKLDDDIKIFNKDDSYLNKGKKQENTITKFHFVDILSKIDKSFVEDIFASDKSYTIMREIFDVLHYEKSPKLIYKQLKNKISDEQVIIDLIRNKKGNSLNISSFAMLQLLPYLKEGLTLDEVKQKLGLQRQEDYAEYKKGIKYLHITNYEKDDELEINNHPVKYAVSAALRVVKHLHTEYGTFDEIKVESTRELSLGEKARKEIEKANKAFEKEIEQIVENVEYQKIAKSYGKNLRKYARKILMWEEQERLDIYSGKSIGITDIFSNSVDLDHIVPQSLGGLSVKHNFVLVHRDENLQKSNQLPMNYIKDTQAYTNRVEHLLREHKINWKKAKNLLATNLDEVFKDRFESKSLRATSYIEALTAQMLKRYYPFKDVRKLKDGSAVRHLQGRATSNIRKVLGVKTKSRETNIHHAIDALLIGVTSHSWLQKLSNTFRENFGCIDDEARKNIKKALPYMDGLEIKDLVKEIEEQYNSFGEDSIFYRNIWGKVKTVNFWVSKKPMSSKVHKDTIYAKKGDGIYTVRENIIAKFIGLKVIPTTSPEEFMKRFHKEILQKMYLFKTNPHDVICKLVEQRGEEIKELLWSFEFLDVKNKEEMSEAKTKLELLIHKDLLDNNGNVIRKVKFYQTNLTGFDVRGGLATKEKTFIGFRAYKENEKLEYERIDIANIEKIQKVNDGSFKAYKNDVVLFIYNDGSFKGGRVVSYIKKSSGSQLCAFLNPKFPTASEYQPSSFCKIEKGKHSGAKQQSIGSAKGIIKLNLDILGNIKSYQILGNAKSKILDEIKNIVSH

SEQ ID NO: 399 - protein, 1116 aa, synthetic construct
  REGION 1..1116: note = MG86-44 effector
MKKILSLDLGITSIGYSVLKELENDRYSLINYGVSMFDKATDKDGNSKKLLHSATTSTSNLYTLRKKRKKNLAKIFEKYGLGNSSDLLTQEKQNVYINKWELRAKKAFEEKLEVSELFSIFYLIAKHRGYKSLDSDDLLEELSIKLELNIEKKQVKKEDDEKGQIKKALQTIEAMRMEQPDKAVAQIIYEIEIQKQTPTFRNHDNYNYMIRREYINDEIKKIVKSQEKLGLFGRDIAVDDFIEELILTIDDQKDSSNDLSLFGKCEYFKEEKVAHQYSLISDIFKMYQSVSNITFNKNIRITKEQIKLIADDFFSKIVLGKNIPDLKYKEIRKILKLDDSFKIFNKEDTQISKGKKQDNTITKFHFLSNLSKIGNSFIIDAFKHENKYEILKEIFDVLEFEKAPHAIYKALKTKVDDETIINLIKNKNGNSLSISTLAMIKFIPYFEDGFTMDEIKKKLNLDRNEDYSVHKKGIKHLNISNFEAYDDLIINNHPVKYVVSATLRIIKHLHTLHGAFDEIRVESTRELSQNEETKKEINKANRALEKQIGEIVANKEYQKIADSYGKNLRKYARKILMYEEQNRRDMYTGEGIEFKDIFTNAVDLDHIVPQSLGGLSVKHNFVLVHRDTNLQKSNQLPMNFIADKQNFINRVEDLFSEHKINWKKKINLLAENLDETYRDTFESKSLRATSYIEALTAQILKRYYPFPDAKKQSDGSAVRHIQGRATSNIRKLLHVKTKVRDTNIHHAIDAILIGLTNQSWLQKLSNTFRKNMGVIDDEARANIKKEIPLIEGIEPKELVAMIEDKYNEFGKDSVFYKDVWDKTKVVNFWVSKKPMVSKIHKDTIYAKKPNGIFTVRENIINQFIALKITASTSSDKFMESFEKEILKKMYLYKTNPKDVICKIVQNRANEITSLLQSFMGIDAKDKSLMSEAKVQLDALIHKELVDNNGNIIRKVKFSQTNLTGFNIRGGLTTKEKTFIGFKSWMKDEKLNYERIDVANFNQIKKEKNNNFKVYKNDIVFFVYPDSSFRGGKIMSLLEESRVASFSNSKYPALVKSQPLSFINISKGKAVNHKQHAISKATGIIKLNLDILGNIKSYQIIGNAKSELLDFIKDTLQ

SEQ ID NO: 400 - protein, 1111 aa, synthetic construct
  REGION 1..1111: note = MG86-45 effector
MSKKILSLDLGITSIGYSVLDELQNDRYSLLDYGVSMFDKATDKDGNSKKLLHSSSTSTAKLYGLRKKRKKDLAKLFEEFGFGDKKYFLYQEKQNIYKNKWELRAKKVFDKKLKIEELFTIFYTLAKHRGYKSLDSDDLLEELCSELDIKIDDKKPKKVEDEKGQIKKALLTIEELRKNSSKTVAQIIYELEIKKSNPTFRNHDNYNYMIRREYIDEEIEKLIQSQTKFGLFKDDFDEKLFVEKLKNIITWQNPSTNNMSLFGNCEYYPDEKVAHQYSLISDIFKMYQSVSNITFNTKPTIGITKEQIGLIADDFFMKIKKGKSIADIKYKDIRKVLKLSSDMKIFNKDDGKLTITKFHFVNSLSKIDNSFILDALTKENSYEILKDIFEALQFEKDPKAIYERLKDRVDDKTIINLIKEKNGNSLNISQHAMIKFIPYFEQGYTTDEIKEKLGLNRSEDYSGFKKGIKYLHVSTYEKDDGLKINNHPVKYVVSATLRLIKHLHVEHGAFDEIRVESTRELSQNEQTKKDIDKANRALEKQIDDIVANKEYQKVAEHFGKNLRKYARKILMYEEQGRRDIYSGDGIEFKDIFTNAVDLDHIVPQSLGGLSVKHNFVLVHRDTNLQKSNQLPMNFVKDKQDYTNRIDNLFAEHKLHWKKKINLLATTLDETFQDRFESKSLRATSYIEALSAQLLKRYYPFVDEKKRVDGSSVRHIQGRATSNIRKLLHVKMKARDTNIHHAVDAVLIGLTNASWLQKLSNTFRDNMGVIDDEARAKIKKDLPLIEGIEPKELIEMIEDRYNEHGEDSVFYKDIWGKTKSVNFWVSKKPMVSKIHKDTIYAKKPNDIYTSRINITNALIGLKTTVTTKPDDFMKKFEKDILKKMYLYETNPNDAICKVVRKRAEEINGLLIGFADIDKKDKEAMQEAKVRLDELMHKELIDNNGKIIRKIKFFQTNLTGFNIRGGLATKEKTFIGFKASVENDKLKYERIDVANFQKTKKENDNSFKVFKNDLVFFVYPDGSFKGGKIVSFLEDKKMCAFSNPRFPASIRLQPHSFLTIFKGKANSHKQQSVNKAIGIIKLNLDILGNIKSYKIIGEIQSELFEFIEGIKNG

SEQ ID NO: 401 - protein, 1108 aa, synthetic construct
  REGION 1..1108: note = MG86-46 effector
MKKILSLDLGITSIGYSVLDELENDRYSLIDYGVSMFDSPIDKDGNSKKLLHSQSKSTKNLFNLRKIRKQNLASLFEKYDLGKSEQLLQQEKDNIYINKWQLRCEKAFNEKLKVEELFTIFYALAKHRGYKSLDSDDLLEELSAELDIEFQNNTKKKVDDEKGKIKKALKTVEALKEEYPDKTVAQIIYEVEMNGTNPTFRNHDNYNYMIRREYINDEIKKIILAQKNFGLFKGNFSVDVFILELVKTIDDQKESTNDLSLFGNCEYYQDEKVAHQYSLLSDIYKMYESVSNINFNKEKTKITKEQIRAVSDWFFEKIEKGKSFSEIKHKDIKRILNLDENTKIFNKDDGRIVKFHFVSNLSKIDNSFIIEAFKKENKYEVLKEIFDVLEFEKAPKRIYEQLKSLVDDKTIIDLIKYKNGNSLHISAFAMIEFIPYFEQGLTLSDIKKKLNLKENEDYTKYKKGIKYLHLDTFEKDDDLKINNHSVKYVVSATIRLIKHLHSTYGAFDEIRVESTRELSQNEETRKNIEKANRELEKQIDEVMLNKEYQEIANEYGKNLRKYARKILMYKEQERRDIYTGEGIEFKKIFTNEVDIDHIVPQSLGGLSVKHNFVLAHRDSNVRKSNQLPINFVLDKQAFINRVENLFKEHKINWKKRKNLLANTIDDVFQDTFESKSLRATSYIEALTAQLLKRYYPFANEKKQADGSAVRHVQGRATSNIRKVLHVKTKTRDTNIHHAIDAILIGLTNKSWLQKLSNTFRENVGVIDDEARAKIKKEIPLIEGIKPKELVSMIEENYNSFGEDSVFYRDIFGKTKTVNFWVSKKPVSSKVHKDTIYAKKEEGIFTVRESILNQFVSLRITPKTSSVKFMEEFNKKILQKMYLFKTNPKDVICLVVQNRAEDIKNMLYSFEGIDAKNKELMSESKQKLEGLIHSNLVDNNENIIRKVKFYQTNLTGFYVRGGLATKEKTFIGFKAILENGKFLYERIDVINFAKIQKENDNSFKVFKNDIVFFIYPDGSFRGGKIVSFLEEKSIVAFSNPKFPAKISSQPHSFLTLFNGKANSHKQFTIGKAVGIIKLNLDILGNIKSYQVIGNAKSEFLETIKGIVNG

SEQ ID NO: 402 - protein, 1116 aa, synthetic construct
  REGION 1..1116: note = MG86-47 effector
MKKILSLDLGITSIGYSILRELQNDRYSLVDYGVSMFDKPTDKDGNSKKLLHSASMSQTNLYTLRKQRKQNLAQLFEDFALAKKEDLIKQERENLYINKWELRAKKAFDEKLEIGELFSVFYLLAKHRGYKSLDSADLLEELCDDLNLHVKEKKSKKEDDEKGKIKKALQNIEQLRIENPEKTVAQIIYEVEIQKENPSFRNHDNYNYMIRREYINDEIKKIVKSQENFGLFTINTDDFISKLIATIDDQKDSTNDLTLFGNCEYYPDEKVAHQYSLLSDIFKMYESVSNITFNKEKNKITKEQIKSVADDFFTKLKKGGKNIADIKYKDIRKILKLDDSIKIFNKEDSYLNKGKKLEHTVIKFHFVSNLSKIDNTFILDAFKSENSYEILKDIFDTLAFEKAPHAIYKKLKDRVNDETIIALIKNKSGNSLNISHRAMIKFIPYFEQGFTTDEIKKKLNLERKEDYSFYKKGIKYLHVNSFEKDDNLKINNHPVKYVVSATLRVIKHLHVKHGAFDEIRVESTRELSQNEQTKKDIDKANRALEKQINEIVENREYQQIAENYGKNLRKYARKILMWEEQDRFDIYTGKSIGFEDIFTNMVDLDHIVPQSLGGLSVKHNFVLVHRDANMQKSNRLPLGFIRDKQAFINRVEHLFLEHKINWKKKKNLLAESLDDVFKDRFESKSLRATSYIEALTAQILKRYYPFVDDKKQHDGSAVRHIQGRATSNIRKLLHVKTKVRDTNIHHAIDAILIGLTSHSWLQKLSHTFRENIGVIDDEAREKIKKEMPLIEGIEPKELIEMIDDSYNFYGEDSLFYKDIWGRTKVVNFWVSKKPMVSKIHKDTIYAKKAGSIYTVRDNIINKFVLLKISNTTTPTKFMESFEKNILKKMYLYKTNPKDIICQIVQQRAQEIEWLLESFLDLDKKDKELMSEAKVKLDALIHRDLIDNNGKVIRKVKFFQTNLTGFKIRGGLATKEKTFIGFKVHLEDEKLVYGRIDAANFDRIKKENDNSFKVYKNDVVFFVYADESFKGGKIVSFLEDKKMAAFSNSRFPASIGLQPHSFLTIFNGKANSHKQQSLNKAVGIIKLNLDITGTIKSFQSIGTINSELLEFIKEAKK

SEQ ID NO: 403 - protein, 1091 aa, synthetic construct
  REGION 1..1091: note = MG87-1 active effector
MEKYIIGLDLGINNVGWSVVDAQTNKIKYLGVKQFEASDSAKDRRTQRNTRRRLKRRETRKTDILKILSNINFPNNLTIDTMLIETRCKGINEQISKQDITNILCYMATHRGYIPFGDEEVSFVDLDGKYPCEYYYEMFKSSTNNKYRALRNTVKNEENINEVKKMLETQRKYYPEITNETIENIVTTLQRKRKFWEGPGSINALTDYGRFKTPEDVVEYLDKKKENPEYEKYIFEDLIGKCSVIPNEKCVSQINFYAEKFNLLNDFINISFKSIEELNNKDDFYETQVKTYKLRESGLNKVFDYCMSKDTLTIKGLFKDLFATTIDNISGYRQDGHDPNKPEMSTMNTFRSIRKTFKECNANMDIFKPENTDLYNEIINYMMLVPGQVELINMLSTIMPLSENDKEALKKVFKSKKTNLKYHSLCEKILIRACNDMLSLQKNYMQVYKLKDYGKESRKEFVKRYEESNKGEKLMNPTFIDDIISSPQVKKTLRQSVKVINEIIKNEKSLPDVIVVESTKDTLNSEKMRKVYIDINKKQKALHDKAIKTLSSIGYSEKDISKKKIEKLMLYEEFDGLCPYCNNQITLKYLINGSDEIEHILPRSNSFDDSFDNRTVSCANCNKNKNNQTPLEFLKGNEKESFIERIKSNKNISEFKKENFLFAGDISKYRTRFFNRNLRDTAYATKEMINQINIFNLYLESKNKDERIKTLSTPGQITHSIRKRYDLEKDRDTDIPYHHAIDASILALLPTTKIGSKVVMFQNDNKFFLNENNKDKMTEIGLELKYYDTSEGKIEYDDYIADFKNINDTSNIFMYSPEVKKEPNKGLFNANMYKVIKIDDKYYKIDQINDIYNLSDSDKKLLPKLFDDAKNETLLCKLQHKEFYEKLKNIYIKYSDSKNSPFEDYQREINNLSKEDKFDYLKHGLKMSENAPSVKRLRYYTPISEPYLIDKKSINKKDGTYLAFDSLAQAGIEVYYNETKNCFAFVPIPSVCYNLKTRKVNRKHKLYKRYKELNLKDYKVKYIVTLYNGNTIEVLKKDNTIIKGVVSSYHKTNDKIVLKNGSYFTKSDLEFSIIDYNPIGKSQKRLTKRIK

SEQ ID NO: 404 - protein, 1123 aa, synthetic construct
  REGION 1..1123: note = MG87-2 active effector
MKKYTIGLDLGINNVGWAKYDLETKKVIDKGVVRFKESSTAQDRRIIRGSRRLRKRKQHRVERLAIQLSNINFCTSRSYEPELLNKRIKGLNESLSEQEITNIIYWFAIHRGYIPFDEEKPEREVHKFAEDEYPCQYIFDYYKEYGVYRGQCDLISLKDNLKELKQILLTQQKYHSKLTDEVIDNILYIIQSKREFWEGPGASKENQLSPYGRYRTLEDLEKYKADPTYHQYLYEMLIGKCELSIDKDGFMDQVAPKCNFYAEEFNFYNDFINMSVKEPSQIDEEYRNKITLKGKFTEDTIEEIKKEIISTKKVSLDKLVKKILGLELKDIQGYRIDKKYKPEISQFEFYKYLLKSFKDEKLNPSWLENDDKTIYNQIVYILTVAPSTYAIEDMLKDRVKEVEFKKEEIDVLIDIKKKKNPDLKYHSLSERILKKALDDIKRHNCEYNFMQIMKRLEYEKEMKEYFQNNYSTKTQSPYTIEDQYIDHLIANPQVKKTLRKAIKIINAIIKEEKNYPETIVIESATSLNSKERKKQIEEEQKTFNQLNKEVKKELEDNGYEATDKNMQLLINWKETNESCIYCGESISLKEVLITEIEHILPKSKSMDNSHNNTTCSCLKCNKEKNNRTPYQYLTSKNMYEGFKNRVMNQYDKMSQDKKSNLLFEGDIDKYSIKFINRNLRDTSYASVALVQELKKYNEYLGAKEGYKINIITSPGQLTSKIRQYLKIKDKDRTYLYHHVVDAMILASIPDTEIGKVLIEAQNDSQYWFKDKNKENKYKEEVYNMLNNVWLSNRDQIQKFNQDCDNMPDNNKEGLIKRSYEVLKNPVRQFSQYTEYAKYIKQNDVYYKISQIDNIYNLLIRKKDGSADKDKKLLDELFDLSNKKNKTLLCEKKDPKLYQKLKNIYEKNSFSINPFVDESKYMYGLEDGDKFDCLKQGIRKTDNSNSPLVIKLRYLEKVTNPYIKNNITTRRKNLYNEFTINKPKKDTLIGLDGLKQVSTRIFYSYEDKKFIFLPICAISFVNGKLNKKEKNYQTTYNRLIGNKNVKEMGNIYVGEWVGVYKKNGEYFEGRYKGYHKTSNVLEYYINGLDTLSCATIGSSDLRIIIYTTDILGNRHIRLDTQKEI

SEQ ID NO: 405 - protein, 1085 aa, synthetic construct
  REGION 1..1085: note = MG87-3 active effector
MTKNYSIGIDMGVNNIGWSILNNDTKKLENYGVRLFPTSNDAKERREVRNTRRRLKRKETRLDDTLYLLKKYGFNEDNTIEENLIEKRVKGLNEKLEKQDIVNILCYMIKHRGYIPFGDEEVTLVDLNGKYPCEFYYEMYKNGGKYRNRKMTVRITDNEKEIKKILETQSKYYKNINQDFINKYLNILTRKRKYWEGPGSINDLTPFGRFKTQEDVENYLEEKRKNPSYEKYIYEDLIKKCDYELEERCCCKLNIYYELFNMYQDFINVSFKNIEELENKDCFYETKNGLYKLNKKGLLMVKDYCMNNFKLKYTDILKKLFNTDKDNISGYRIDKDHKPEFSTLNSYRKIMLEFTEKGFDTTWVSDYNCYNEIMEKMTLTPGGVEFIKEIENNKLVPYKFNEEEKSLFKELKEYFNKKTLLSYGSLSQKILQKAINDMLDLEKNFMQVSRIKDYGKEARENFIKQYKKTSNKLEINASFVDDIIASPQVKKSLRQAIKIINAIIEKEGCLPVSIAIESTKELNSDKKKKEIEKEQKIQENLRKQASNYLSTVFGDSSVTETNILKVMLYNETNGHCAYCNKPLSINDIFADNIQVDHILPISKSFNDSFNNKIISCKKCNDDKKNNTPYQFLKNKNYFEEFEKRVLENKNISDYKKDNLLYKDDLDKYKTRFFNRNLRDTAYATTELINQIEIFNNYLEILDKKRINTLSVPGQITSSIRNRYVKNEDKTSLEKNRDAGVFHHAVDASIVVSVSDTHIGQIMLKAQNDKEYWIKNKSNYDDIYKYLINLRIDDTINQIEKINNENIKVSKQVSKNPQGKLANSNIYKMIKKDNEQYIINQIDNIYTFDFKKDENKKLFEKLLNEENNEFTLLCYDNDKNTFNYIKKIYNEYKNEKGNPFVNYLIDKGEIPDGNSFDYDITGIRMVTKKGNGPIIKRLRYYSKKNDLYILNKKNINKKDSNYLALDSLKQFCVKVYVDNDNKKFVFLPIYTISLDPKTKKVNENDEFYKLFYNKYIGNKNVTFFADIYNGNKLEITKKDGTIVSGYYSTFNKANNKLILNNGDTFTLSDKKISIIHTDILGNEKKG

SEQ ID NO: 406 - protein, 227 aa, synthetic construct
  REGION 1..227: note = MG87-4 effector
MEKYIIGLDLGINNVGWSVVDAQTNKIKYLGVKQFEASDSAKDRRTQRNTRRRLKRRETRKTDILKILSNINFPNNLTIDTMLIETRCKGINEQISKQDITNILCYMATHRGYIPFGDGEVSFVDLDGKYPCEYYYEMFKSSTNNKYRALRNTVKNEENINEVKKMLETQRKYYPEITNETIENIVTTLQRKRKFWEGPREGSGGIWHRITTRRTEGSCWNLRAVVI

SEQ ID NO: 407 - protein, 1090 aa, synthetic construct
  REGION 1..1090: note = MG87-5 effector
MTKNYSIGIDMGVNNVGWSILNNDTKKLENYGVRLFPTSNDAKERREVRNTRRRLKRKETRLDDTLYLLKKYGFNEDNTIEENLIEKRVKGLNEKLEKQDIVNILCYMIKHRGYIPFGDEEVTLVDLNGKYPCEFYYEMYKNGGKYRNRKMTVRITDNEKEIKKILETQSKYYKNINQDFINKYLNILTRKRKYWEGPGSINDLTPFGRFKTQEDVENYLEEKRKNPSYEKYIYEDLIKKCDYELEERCCCKLNIYYELFNMYQDFINVSFKNIEELENKDCFYETKNGLYKLNKKGLLMVKDYCMNNFKLKYTDILKKLFNTDKDNISGYRIDKDHKPEFSTLNSYRKIMLEFTEKGFDTTWVSNYNCYNEIMEKMTLTPGGVEFIKEIENNKLVPYKFNEEEKSLFKELKEYFNKKTLLSYGSLSQKILQKAINDMLDLEKNFMQVSRIKDYGKEARENFIKQYKKTSNKLEINASFVDDIIASPQVKKSLRQAIKIINAIIEKEGCLPVSIAIESTKELNSDKKKKEIEKEQKIQENLRKQASNYLSVVFGDSNATETNILKIMLYNETNGHCAYCNKPLNINDIFTDNIQVDHILPISKSFNDSFNNKIISCKKCNDDKKNNTPYQFLKNKNYFEEFEKRVLENKNISDYKKDNLLYKDDLDKYKTRFFNRNLRDTAYATTELINQIEIFNNYLEILDKKRINTLSVPGQITSSIRNRYVKNEDKTSLEKNRDAGVFHHAVDASIVVSVSDTHIGQIMLKAQNDKEYWIKNKSGYDDIYKYLINLRIDDTINQIEKINNENIKISKQVSKNPQGKLANSNIYKMIKKDNEQYIINQIDNIYTFDFKKDENKKLFEKLLNEENNEFTLLCYDNDKNTFNYIKKIYNEYKNEKGNPFVNYLIDKGEISDGNSLDYDITGIRMVTKKGNGPIIKRLRYYSKKNDLYILNKKNINKKDSNYLALDSLKQFCVKVYVDNDNKKFVFLPIYTISLDPKTKKVNENNEFYKLFYNKYIGNKNVTFFADIYNGNKLEITKKDGTIVSGYYSTFDKSANRLETQNGYIFVCSDKKISIVHTDILGNEKKRLTKEL

SEQ ID NO: 408 - protein, 1091 aa, synthetic construct
  REGION 1..1091: note = MG87-6 effector
MKYIIGLDLGINNVGWSVVNAETTEIKSYGVKKFSTSNGASDRRNFRNSRRRLKRKDTRKEDVLKILNGINFPNNLTIDTKLIETRCKGLNEKISKQDITNILAYMAVHRGYIPFGNEEVSFVDLKGKYPCEYYRDKLLNSINNKYRAQRETVKNKDNEKEIRKILKTQQEYYPEITNDIIEKLIETLNRKRKFWEGPGGLNSLTSFGRFKTDEDVIKYKEQKDKNPDYEKYIFEDLIGKCEVDPDEKCASTGNFYAEKFNLLNDFINVSFLSIDEINNKEDFYLTDNKTYKLKETGLNKVFEYCLEKENITIKGLLKDLFATSVNNMSGFRQKDHDPNKPDMSTMNIYRSVKKIFAKNSANMDIFKLDNIDKYNDIINYLMLVPGNVELINMISSMVMSLTENDENALKEAFKSKGKDLRYHALCEKILKRACNDMQSLQKNYMQVYKLKDYGKKSRELFIRKYEEQNKDKLLLNSSFIDDIVASPQVKKTLRQAEKVINEIVKDMKSLPYAIAVESTKEELSGNDKRNMYIAMNKKNKELHDKAEETLKSLGYDINQITKKKITKIMLYEEFNGLCPYCGKSININSLINGSDEIEHILPRSDSFNDSLDNRTISCADCNSKKGNKTPLQYLTGSDKESFINRIKSNKNISELKKNNFLFDGDISKYRTRFFNRNLRDTAYATKELIKQINIFNNYLEFKSNSKKILTMSTPGQLTHDIRERYNLEKDRDAGQKPFHHAVDASIVALLPTTSIGKKILNFQNNDNFFISQDSKKIMQDIGTELKYYDTKKDKIEYDDYIKDLKTISDTNPKFMYSPEVNKEPNKQLFNANMYKLIKKEDKYYKIEQIDNIYEPKLDLALLEKLFDDSKNETLLCQAQHQDFYSKLKKIYFEYKDSNISPFEAYQREVNNLSKEDKFDYLIHGIKMSQNGPVVKKLRYYTPISEPYLIDKKSINKKNNTYLAYDGLAQAGIEVYYNIDKNTLVFVPIPSIAVNLKNRAINYQHPVLVKYCKKYLNDCNAKRIVTLFNGNTIEVYKSKGNIVKGEVSSFDKNSNRIRLRDGSSFVTSDRGFSVIDYSPIGKSQKRLTFMIK

SEQ ID NO: 409 - protein, 1120 aa, synthetic construct
  REGION 1..1120: note = MG87-7 effector
MKKYTIGLDLGINNVGWAKYDLEAKKVIDKGIVRFKESSAAQDRRDRRGSRRLRKRRQHRVERLAVQLSNINFCTSRSYEPELLNKRIKGLNESLSEQEITNIIYWFAIHRGYIPFDEEKLEREVHNFAEDEYPCQYISNFYKEYGVYRGQCDLIFLKDNIRELKKILITQQKYHSKLTDEVVDNILDIIKSKREFWEGPGAPKENQLSPYGRYRTLEDLEKYKKDSNYHKYLYEMLIGKCELSMGRDGSIDNVAPKCNYYAEEFNFYNDFINMSVKEPSQIDEDYRNKITLKGKFIEETIEEFKKEILNAKTVSLEKLIKKVLGLELKDIQGYRIDKKYKPEISQFKFYKYLVNQFKNKNLNPTWLEDEDKTIYNQVIYVLTVAPSTYAVEDMLKERVKEIEFKKEEIDVLKNIKSKKNPDLNYHSLSESILKKALNDIKKYNCEYNFIQIMKKLEYEKEMKEYFQNNYSNKTEKPYTIEDRYIDNLIANPQVKKTLRKAIKVINAIIKEEKNYPEAIVIESATSLNSKERKKQIEEEQKTYDELNEEAKKELEVNGYETNDKNIQLLINWKETNESCIYCGKHISLKEVLTTEIEHILPKSKSMDNSHNNTTCSCLNCNKEKNNRTPYQYMTSQNKYESFKDCVIKKYDKMSQIKKSNLLFEGDIEKYSIKFINRNLRDTSYASVALVQELKKYNEYLEAKEGYKIHIVTSPGQLTSRIRRYLKMNKNRDYLYHHVVDAMILASIPDTEIGKVLIDAQNDNQYWFKHKDDEYKEKVYNMLDNVWLVNRDQIQKFNQDCDNMPEDNKDGLIKRSYEVSKNPVQQFIQYTEYTKYIKQDDSYYKISQIDNIYNLLIRKKDGSADKVKKDLDELFGLSNKKTKILLCEKKDPKLYQKLKDIYIKNASSINPFIDECKYMYGLEEGNQFNYLKHGIRKTDNPNSPLVIRLRYLEKVTNPYIKNTITTKRRNLYHEFTINQPKKNTLIGLDGLKQVSTSIFYAYEDKKFIFLPICAISFINGKLNEKENNYQTTYNRLIGNKKVTKIGNIYTGEWVGVYKKNGQYLEGRYKGYHKKNNCLEYYINGLDTLSCSTISSSDSRIIIYTTDILGNRYIRLDTDKII

SEQ ID NO: 410 - protein, 1090 aa, synthetic construct
  REGION 1..1090: note = MG87-8 effector
MTKNYSIGIDMGVNNVGWSILNNDTKKLENYGVRLFPTSNDAKERREVRNTRRRLKRKETRLDDTLYLLKKYGFNEDNTIEENLIEKRVKGLNEKLEKQDIVNILCYMIKHRGYIPFGDEEVTLVDLNGKYPCEFYYEMYKNGGKYRNRKMTVRITDNEKEIKKILETQSKYYKNINQDFINKYLNILTRKRKYWEGPGSINDLTPFGRFKTQEDVENYLEEKRKNPSYEKYIYEDLIKKCDYELEERCCCKLNIYYELFNMYQDFINVSFKNIEELENKDCFYETKNGLYKLNKKGLLMVKDYCMNNFKLKYTDILKKLFNTDKDNISGYRIDKDHKPEFSTLNSYRKIMLEFTEKGFDTTWVSDYNCYNEIMEKMTLTPGGVEFIKEIENNKLVPYKFNEEEKSLFKELKEYFNKKTLLSYGSLSQKILQKAINDMLDLEKNFMQVSRIKDYGKEARENFIKQYKKTSNKLEINASFVDDIIASPQVKKSLRQAIKIINAIIEKEGCLPVSIAIESTKELNSDKKKKEIEKEQKIQENLRKQASNYLSAVFGDSNATETNILKVMLYNETNGHCAYCNKPLNINDIFTDNIQVDHILPISKSFNDSFNNKIISCKKCNDDKKNNTPYQFLKNKNYFEEFEKRVLENKNISDYKKDNLLYKDDLDKYKTRFFNRNLRDTAYATTELINQIEIFNNYLEILDKKRINTLSVPGQITSSIRNRYVKNEDKTSLEKNRDAGVFHHAVDASIVVSVSDTHIGQIMLKAQNDKEYWIKNKSGYDDIYKYLINLRIDDTINQIEKINNENIKISKQVSKNPQGKLANSNIYKMIKKDNGQYIINQIDNIYTFDFKKDENKKLFEKLLNEENNEFTLLCYDNDKNTFNYIKKIYNEYKDEKGNPFVNYLIDKGEISDGNSLDYDITGIRMITKKGNGPIIKRLRYYSKKNDLYILNKKNINKKDSNYLALDSLKQFCVKVYVDNDNKKFVFLPVYTISLDPKTKKVNENDEFYKLFYNKYIGNKNVTFFADIYNGNKLEITKKDGTIVSGYYSTFDKSSNRLETQNGHKFVCSDKKISIIHTDILGNEKKRLTKEL

SEQ ID NO: 411 - protein, 1091 aa, synthetic construct
  REGION 1..1091: note = MG87-9 effector
MKYIIGLDLGINNVGWSVVNAETTEIKSYGVKKFSTSNGASDRRNFRNSRRRLKRKDTRKEDVLKIINDINFPNNLTIDTKLIETRCKGLNEKISKQDITNILAYMAVHRGYIPFGNEEVSFVDLKGKYPCEYYRDKLLNSINNKYRAQRETVKNKDNEKEIRKILKTQQEYYPEITNDIIEKLIETLNRKRKFWEGPGGLNSLTSFGRFKTDEDVIKYKEQKDKNPDYEKYIFEDLIGKCEVDPDEKCASTGNFYAEKFNLLNDFINVSFLSIDEINNKEDFYLTDNKTYKLKETGLNKVFEYCLEKENITIKGLLKDLFATSVNNISGFRQKDHDPNKPDMSTMNIYRSVKKIFAKNNANMDIFKLDNIDKYNDIINYLMLVPGNVELINMISSMVMSLTENDENALKEAFKSKGKDLRYHALCEKILKRACNDMQSLQKNYMQVYKLKDYGKKSRELFIRKYEEQNKDKLLLNSSFIDDIVASPQVKKTLRQAEKIINEIVKDMKSLPYAIAVESTKEELSGNDKRNMYIAMNKKNKELHDKAEKTLKSLGYDINQITKKKITKIMLYEEFNGLCPYCGKSININSLINGSDEIEHILPRSDSFNDSLDNRTISCADCNSKKGNKTPLQYLTGSDKESFINRIKSNKNISELKKNNFLFDGDISKYRTRFFNRNLRDTAYATKELIKQINIFNNYLEFKSNSKKILTMSTPGQLTHDIRERYNLEKDRDAGQKPFHHAVDASIVALLPTTSIGKKILNFQNNDNFFISQDSKKIMQDIGTELKYYDTKKDKIEYDDYIKNLKTISDTNPKFMYSPEVNKEPNKQLFNANMYKLIKKKDKYYKIEQIDNIYDSKLDLTLLEKLFDDSKNETLLCQAQHQDFYSKLKKIYFEYKDSNISPFEAYQREVNNLSKEEKFDYLIHGIKMSQNGPVVKKLRYYTPISEPYLIDKKSINKKNTTYLAYDSLAQAGIEVYYNIDKNNLVFVPIPSIAVNLKNRAINYQHPVLVKYCKKYLNDCNAKRIVTLFNGNTIEVYKSKGNIVKGEVSSFDKNSNRIRLRDGSSFVTSDRGFSVIDYNPIGKSQKRLTFMIK

SEQ ID NO: 412 - protein, 1091 aa, synthetic construct
  REGION 1..1091: note = MG87-10 effector
MKYIIGLDLGINNVGWSVVNAETTEIKSYGVKKFSTSNGASDRRNFRNSRRRLKRKDTRKEDVLKILNGINFPNNLTIDAKLIETRCKGLNEKISKQDITNILAYMAVHRGYIPFGNEEASFVDLKGKYPCEYYRDKLLNSINNKYRAQRETVKNKDNEKEIRKILKTQQEYYPEITNDTIEKLVETLNRKCKFWEGPGGLNSLTSFGRFKTDEDVIKYKEQKDKNPDYEKYIFEDLIGKCEVDPDEKCASTGNFYAEKFNLLNDFINVSFLSIDEINNKEDFYLTDNKTYKLKETGLNKVFEYCLEKENITIKGLLKDLFATSVNNISGFRQKDHDPNKPDMSTMNIYRSVKKIFVKNNANMDIFKLDNIDKYNDIINYLMLVPGNVELINMISSMVMSLTENDENALKEAFKSKGKDLRYHALCEKILKRACNDMQSLQKNYMQVYKLKDYGKKSRELFIRKYEEQNKDKLLLNSSFIDDIVASPQVKKTLRQAEKVINEIVKDMKSLPYAIAVESTKEELSGNDKRNMYIAMNKKNKELHDKAEETLKSLGYDINQITKKKITKIMLYEEFKGLCPYCGKSININSLINGSDEIEHILPRSYSFNDSLDNRTISCADCNSKKGNKTPLQYLTGSDKESFINRIKGNKNISELKKNNFLFDGDISKYRTRFFNRNLRDTAYATKELIKQINIFNNYLEFKSNNKKILTMSTPGQLTHDIRERYNLEKDRDAGQKPFHHAVDASIVALLPTTSIGKKILNFQNNDNFFISQDSKKIMQDIATELKYYDTKKDKIEYDDYIKDLKTISDTNPKFMYSPEVNKEPNKQLFNANMYKLIKKEDKYYKIEQIDNIYDPKLDLTLLEKLFDDSKNETLLCQAQHQDFYSKLKKIYFEYKDSNISPFEAYQREVNNLSKEEKFDYLIHGIKMSQNGPVVKKLRYYTPISEPYLIDKKSINKKNTTYLAYDSLAQAGIEIYYNIDKNCFAFVPIPCICYDFKTGKVNKEHPEYIKYFKKNIGNQNIEYKATLYNGNFIEINKKDGKTIKGEVSCYHKTYDRIDLKNGGLFTKSDQGFSIIDYSPTGKAQKRLTFMIK

SEQ ID NO: 413 - protein, 1090 aa, synthetic construct
  REGION 1..1090: note = MG87-11 effector
MTKNYSIGIDMGVNNVGWSILNNDTKKLENYGVRLFPTSNDAKERREVRNTRRRLKRKETRLDDTLYLLKKYGFNEDNTIEENLIEKRVKGLNEKLEKQDIVNILCYMIKHRGYIPFGDEEVTLVDLNGKYPCEFYYEMYKNGGKYRNRKMTVRITDNEKEIKKILETQSKYYKNINQDFINKYLNILTRKRKYWEGPGSINDLTPFGRFKTQEDVENYLEEKRKNPSYEKYIYEDLIKKCDYELEERCCCKLNIYYELFNMYQDFINVSFKNIEELENKDCFYETKNGLYKLNKKGLLMVKDYCMNNFKLKYTDILKKLFNTDKDNISGYRIDKDHKPEFSTLNSYRKIMLEFTEKGFDTTWVSNYNCYNEIMEKMTLTPGGVEFIKEIENNKLVPYKFNEEEKSLFKELKEYFNKKTLLSYGSLSQKILQKAINDMLDLEKNFMQVSRIKDYGKEARENFIKQYKKTSNKLEINASFVDDIIASPQVKKSLRQAIKIINAIIEKEECLPVSIAIESTKELNSDKKKKEIEKEQKIQENLRKQASNYLSVVFGDSNVTETNILKVMLYNETNGHCAYCNKPLNINDIFTNNIQVDHILPISKSFNDSFNNKIISCKKCNDDKKNNTPYQFLKNKNYFEEFEKRVLENKNISDYKKDNLLYKDDLDKYKTRFFNRNLRDTAYATTELINQIEIFNNYLEILDKKRINTLSVPGQITSSIRNRYVKNEDKTSLEKNRDAGVFHHAVDASIVVSVSDTHIGQIMLKAQNDKEYWIKNKSGYDDIYKYLINLRIDDTINQIEKINNENIKISKQVSKNPQGKLANSNIYKMIKKDNEQYIINQIDNIYTFDFKKDENKKLFEKLLNEENNEFTLLCYDNDKNTFNYIKKIYNEYKNEKGNPFVNYLIDKGEISDGNSLDYDITGIRMVTKKGNGPIIKRLRYYSKKNDLYILNKKNINKKDSNYLALDSLKQFCVKVYVDNDNKKFVFLPIYTISLDPKTKKVNENDEFYKLFYNKYIGNKNVTFFADIYNGNKLEITKKDGTIVSGYYSTFHKTHNYLVLNNDKGVMQSDKKISIIHTDILGNEKKRLTKEL

SEQ ID NO: 414 - protein, 1123 aa, synthetic construct
  REGION 1..1123: note = MG87-12 effector
MKKYTIGLDLGINNVGWAKYDLETKKVIDKGVVRFKESSTAQDRRIIRGSRRLRKRKQHRVERLAIQLSNINFCTSRSYEPELLNKRIKGLNESLSEQEITNIIYWFAIHRGYIPFDEEKPEREVHKFAEDEYPCQYIFDYYKEYGVYRGQCDLISLKDNLKELKQILLTQQKYHSKLTDEVIDNILYIIQSKREFWEGPGASKENQLSPYGRYRTLEDLEKYKADSTYHQYLYEMLIGKCELSIDKDGFMDQVAPKCNFYAEEFNFYNDFINMSVKEPSQIDEEYRNKITLKGKFTEDTIEEIKKEIISTKKVSLDKLVKKILGLELKDIQGYRIDKKYKPEISQFEFYKYLLKSFKDKKLNPSWLENDDKTIYNQIVYILTVAPSTYAIEDMLKDRVKEVEFKKEEIDVLIDIKKKKNLDLKYHSLSERILKKALDDIKRHNCEYNFMQIMKRLEYEKEMKEYFQNNYSTKTQSPYTIEDQYIDHLIANPQVKKTLRKAIKIINAIIKEEKNYPETIVIESATSLNSKERKKQIEEEQKTFNQLNKEVKKELEDNGYEATDKNMQLLINWKETNESCIYCGESISLKEVLITEIEHILPKSKSMDNSHNNTTCSCLKCNKEKNNRTPYQYLTSKNMYEGFKNRVMNQYDKMSQDKKSNLLFEGDIDKYSIKFINRNLRDTSYASVALVQELKKYNEYLGAKEGYKINIITSPGQLTSKIRQYLKIKDKDRTYLYHHVVDAMILASIPDTEIGKVLIEAQNDSQYWFKDKNKENKYKEEVYNMLNNVWLSNRDQIQKFNQDCDNMPDNNKEGLIKRSYEVLKNPVRQFSQYTEYAKYIKQNDVYYKISQIDNIYNLLIRKKDGSADKDKKLLDELFDLSNKKNKTLLCEKKDPKLYQKLKNIYEKNSFSINPFVDECKYMYGLEDGDKFDCLKQGIRKTDNSNSPLVIKLRYLEKVTNPYIKNNITTRRKNLYNEFTINKPKKDTLIGLDGLKQVSTRIFYSYEDKKFIFLPICAISFVNGKLNKKEKNYQTTYNRLIGNKNVKEMGNIYLGEWVGVHKKNGEYFEGRYKGYDKTNNVLEYYINGLDTLSCATIGSSDLRIIIYTTDILGNRHIRLDTQKEI

SEQ ID NO: 415 - protein, 1090 aa, synthetic construct
  REGION 1..1090: note = MG87-13 effector
MTKNYSIGIDMGVNNVGWSILNNDTKKLENYGVRLFPTSNDAKERREVRNTRRRLKRKETRLDDTLYLLKKYGFNEDNTIEENLIEKRVKGLNEKLEKQDIVNILCYMIKHRGYIPFGDEEVTLVDLNGKYPCEFYYEMYKNGGKYRNRKMTVRITDNEKEIKKILETQSKYYKNINQDFINEYLNILTRKRKYWEGPGSINDLTPFGRFKTQEDVENYLEEKRKNPSYEKYIYEDLIKKCDYELEERCCCKLNIYYELFNMYQDFINVSFKNIEELENKDCFYETKNGLYKLNKKGLLMVKDYCMNNFKLKYTDILKKLFNTDKDNISGYRIDKDHKPEFSTLNSYRKIMLEFTEKGFDTTWVSDYNCYNEIMEKMTLTPGGVEFIKEIENNKLVPYKFNEEEKSLFKELKEYFNKKTLLSYGSLSQKILQKAINDMLDLEKNFMQVSRIKDYGKEARENFIKQYKKTSNKLEINASFVDDIIASPQVKKSLRQAIKIINAIIEKEGCLPVSIAIESTKELNSDKKKKEIEKEQKIQENLRKQASNYLSVVFGDSNATETNILKIMLYNETNGHCAYCNKPLNINDIFTDNIQVDHILPISKSFNDSFNNKIISCKKCNDDKKNNTPYQFLKNKNYFEEFEKRVLENKNISDYKKDNLLYKDDLDKYKTRFFNRNLRDTAYATTELINQIEIFNNYLEILDKKRINTLSVPGQITSSIRNRYVKNEDKKSLEKNRDAGVFHHAVDASIVVSVSDTHIGQIMLKAQNDKEYWIKNKSNYDDIYKYLINLRIDDTINQIEKINNENIKVSKQVSKNPQGKLANSNIYKMIKKDNEQYIINQIDNIYTFDFKKDENKKLFEKLLNEENNEFTLLCYDNDKNTFNYIKKIYNEYKNEKGNPFVNYLIDKGEISDGNSLDYDITGIRMITKKGNGPIIKRLRYYSKKNDLYILNKKNINKKDSNYLALDSLKQFCVKVYVDNDNKKFVFLPIYTISLDPKTKKVNENGEFYKLFYNKYIGNKNVTFFADIYNGNKLEITKKDRTIVSGYYSTFNKANNKLILNNGDTFTLSDKKISIIHTDILGNEKKRLTKEL

SEQ ID NO: 416 - protein, 1091 aa, synthetic construct
  REGION 1..1091: note = MG87-14 effector
MEKYIIGLDLGINNVGWSVVDAQTNKIKYLGVKQFEASDSAKDRRTQRNTRRRLKRRETRKTDILKILLNINFPNNLTIDTMLIETRCKGINEQISKQDITNILCYMATHRGYIPFGDEEVSFVDLDGKYPCEYYYEMFKSSTNNKYRALRNTVKNEENINEVKKMLETQRKYYPEITNETIENIVTTLQRKRKFWEGPGSINALTDYGRFKTPEDVVEYLDKKKENPEYEKYIFEDLIGKCSVIPNEKCVSQINFYAEKFNLLNDFINISFKSIEELNNKDDFYETQVKTYKLRESGLNKVFDYCMSKDTLTIKGLFKDLFATTIDNISGYRQDGHDPNKPEMSTMNTFRSIRKTFKECNANMDIFKPENTDLYNEIINYMMLVPGQVELINMLSTIMPLSENDKEALKKVFKSKKTNLKYHSLCEKILIRACNDMLSLQKNYMQVYKLKDYGKESRKEFVKRYEESNKGEKLMNPTFIDDIISSPQVKKTLRQSVKVINEIIKNEKSLPDVIVVESTKDTLNSEKMRKVYIDINKKQKALHDKAIKTLSSIGYSEKDISKKKIEKLMLYEEFDGLCPYCNNQITLKYLINGSDEIEHILPRSNSFDDSFDNRTVSCANCNKNKNNQTPLEFLKGNEKESFIERIKSNKNISEFKKENFLFAGDISKYRTRFFNRNLRDTAYATKEMINQINIFNLYLESKNKDEKIKTLSTPGQITHSIRKRYDLEKDRDTDIPYHHAIDASILALLPTTKIGSKVVMFQNDNKFFLNENNKDKMTEIGLELKYYDTSEGKIEYDDYIADFKNINDTSNIFMYSPEVKKEPNKGLFNANMYKVIKIDDKYYKIDQINDIYNLSDSDKKLLPKLFDDAKNETLLCKLQHKEFYEKLKNIYIKYSDSKNSPFEDYQREINNLSKEDKFDYLKHGLKMSENAPSVKRLRYYTPISEPYLIDKKSINKKDGTYLAFDSLAQAGIEVYYNETKNCFAFVPIPSVCYNLKTRKVNREHKLYKRYKELNLKDYKVKYIVTLYNGNTIEVLKKDNTIIKGVVSNYHKTHDNIVLKNGSYFTKSDLEFSIIDYNPIGKSQKRLTKRIK

SEQ ID NO: 417 - protein, 1091 aa, synthetic construct
  REGION 1..1091: note = MG87-15 effector
MKYIIGLDLGINNVGWSVVNAETTEIKSYGVKKFSTSNGASDRRNFRNSRRRLKRKDTRKEDVLKILNGINFPNNLTIDTKLIETRCKGLNEKISKQDITNILAYMAVHRGYIPFGNEEVSFVDLKGKYPCEYYRDKLLNSINNKYRAQRETVKNKDNEKEIRKILKTQQEYYPEITNDIIEKLVETLNRKRKFWEGPGGLNSLTSFGRFKTDEDVIKYKEQKDKNPDYEKYIFEDLIGKCEVDPDEKCASTGNFYAEKFNLLNDFINVSFLSIDEINNKEDFYLTDNKTYKLKETGLNKVFEYCLEKENITIKGLLKDLFATSVNNISGFRQKDHDPNKPDMSTMNIYRSVKKIFAKNNANMDIFKLDNIDKYNDIINYLMLVPGNVELINMISSMVMSLTENDENALKEAFKSKGKDLRYHALCEKILKRACNDMQSLQKNYMQVYKLKDYGKKSRELFIRKYEEQNKDKLLLNSSFIDDIVASPQVKKTLRQAEKVINEIVKDMKSLPYAIAVESTKEELSGNDKRNMYIVMNKKNKELHDKAEETLKSLEYDINQITKKKITKIMLYEEFNGLCPYCGKSININSLINGSDEIEHILPRSDSFNDSLDNRTISCADCNSKKGNKTPLQYLTGSDKEIFINRIKSNKNISELKKNNFLFDGDISKYRTRFFNRNLRDTAYATKELIKQINIFNNYLEFKSNSKKILTMSTPGQLTHDIRERYNLEKDRDAGQKPFHHAVDASIVALLPTTSIGKKILNFQNNDNFFISQDSKKIMQDIGTELKYYDTKKDKIEYDDYIKDLKTISDTNPKFMYSPEVNKEPNKKLFNANLYKVIKKEDKYYKIEQIDNIYDPKLDLKLLEKLFDDSKNETLLCQAQHQDFYSKLKKIYFEYKDSNISPFEAYQREVNNLSKEDKFDYLIHGIKMSQNGPVVKKLRYYTPISEPYLIDKKSINKKNTTYLAYDGLAQAGIEVYYVTDKKCFAFVPILCVCFNFKTCKVNKEHPEYIKYFKKNIGNQNIEYKATLYNGNFIEINKKDGKTIKGEVSCYHKTYDRIDLKNGGLFTKSDQGFSIIDYSPTGKAQKRLTFMIK

SEQ ID NO: 418 - protein, 1090 aa, synthetic construct
  REGION 1..1090: note = MG87-16 effector
MTKNYSIGIDMGVNNVGWSILNNDTKKLENYGVRLFPTSNDAKERREVRNTRRRLKRKETRLDDTLYLLKKYGFNEDNTIEENLIEKRVKGLNEKLEKQDIVNILCYMIKHRGYIPFGDEEVTLVDLNGKYPCEFYYEMYKNGGKYRNRKMTVRITDNEKEIKKILETQSKYYKNINQDFINKYLNILTRKRKYWEGPGSINDLTPFGRFKTQEDVENYLEEKRKNPSYEKYIYEDLIKKCDYELEERCCCKLNIYYEIFNMYQDFINVSFKNIEELENKDCFYETKNGLYKLNKKGLLMVKDYCMNNFKLKYTDILKKLFNTDKDNISGYRIDKDHKPEFSTLNSYRKIMLEFTEKGFDTTWVSDYNCYNEIMEKMTLTPGGVEFIKEIENNKLVPYKFNEEEKSLFKELKEYFNKKTLLSYGSLSQKILQKAINDMLDLEKNFMQVSRIKDYGKEARENFIKQYKKTSNKLEINASFVDDIIASPQVKKSLRQAIKIINAIIEKEGCLPVSIAIESTKELNSDKKKKEIEKEQKIQENLRKQASNYLSVVFGDSNATETNILKVMLYNETNGHCAYCNKPLNINDIFTDNIQVDHILPISKSFNDSFNNKIISCKKCNDDKKNNTPYQFLKNKNYFEEFEKRVLENKNISDYKKDNLLYKDDLDKYKTRFFNRNLRDTAYATTELINQIEIFNNYLEILDKKRINTLSVPGQITSSIRNRYVKNEDKTSLEKNRDAGVFHHAVDASIVVSVSDTHIGQIMLKAQNYKEYWIKNKSNYDDIYKYLINLRIDDTINQIEKINNENIKVSKQVSKNPQGKLANSNIYKMIKKDNEQYIINQIDNIYTFDFKKDENKKLFEKLLNEENNEFTLLCYDNDKNTFNYIKKIYNEYKDEKGNPFVNYLIDKGEISDGNSLDYDITGIRMITKKGNGPIIKRLRYYSKKNDLYILNKKNINKKDSNYLALDSLKQFCVKVYVDNDNKKFVFLPVYTISLDPKTKKVNENDEFYKLFYNKYIGNKNVTFFADIYNGNKLEITKKDGTIVSGYYSTFDKSSNRLETQNGHKFVCSDKKISIIHTDILGNEKKRLTKEL

SEQ ID NO: 419 - protein, 1123 aa, synthetic construct
  REGION 1..1123: note = MG87-17 effector
MKKYTIGLDLGINNVGWAKYDLETKKVIDKGVVRFKESSTAQDRRIIRGSRRLRKRKQHRVERLAIQLSNINFCTSRSWEPELLNKRIKGLNESLSEQEITNIIYWFAIHRGYIPFDEEKPEREVHKFAEDEYPCQYIFDYYKEYGVYRGQCDLISLKDNLKELKQILLTQQKYHSKLTDEVIDNILYIIQSKREFWEGPGASKENQLSPYGRYRTLEDLEKYKADSTYHQYLYEMLIGKCELSIDKDGFMDQVAPKCNFYAEEFNFYNDFINMSVKEPSQIDEEYRNKITLKGKFTKDTIEEIKKEILNTKTISLEKLVKKVLGLELKDIQGYRIDKKYKPEISKFEFYKYLLKSFKDKKLNPHWLENDDKTIYNQIIYILTVAPSTYAIEDMLKDRVKEVEFKKEEIDVLIDIKKKKNPDLKYHSLSERILKKALDDIKRHNCEYNFMQIMKRLEYEKEMKEYFQNNYSTKTQSPYTIEDQYIDHLIANPQVKKTLRKAIKVINAIIKKEKNYPETIVIESATSLNSKERKKQIKAEQKKYDKLNEEAKNELEANGYEATDKNMQLLINWKETNESCIYCGESISLKEVLTTEIEHILPKSKSMDNSHNNTTCSCLKCNKEKNNRTPYQYLTSENRYEGFKNRVMNQYDKMSQDKKSNLLFEGDIDKYSIKFINRNLRDTSYASVALVQELKKYNEYLGAKEGYKINIITSPGQLTSKIRQYLKIKDKDRTYLYHHVVDAMILASIPDTEIGKVLIEAQNDSQYWFKDKNKENKYKEEVYNMLNHVWLSNRDQIQKFNQDCDNMPEDNKDGLIKRSYEVLKNPIQQFSQYTEYAKYIKQDDGYYKILQVDNIYNLLIRKKDGSVDKDKQLLDELFDLSNKKTISLLCEKKDPKLYQKLKDIYIKNASSINPFVDECKYMYGLEEGDKFNYLKQGIRKTDNPNSPLVIRLRYLKRVTNPYIKNNITTRRKNVYNEFTINKPKKDTIIGLDGLKQVSTRIFYSYDDKKFIFLPICAISFVNGKLNKKEKNYQTTYNRLIGNKNVKEIGNIYTGEWVGVYKKNGEYLEGRYKGYHKTSNVLEYYINGLDTLSCAKICSSDLRIIIYTTDILGNRHIRLDTQKEI

SEQ ID NO: 420 - protein, 1120 aa, synthetic construct
  REGION 1..1120: note = MG87-18 effector
MKKYTIGLDLGINNVGWAKYDLEAKKVIDKGIVRFKESSAAQDRRDRRGSRRLRKRRQHRVERLAVQLSNINFCTSRSYEPELLNKRIKGLNESLSEQEITNIIYWFAIHRGYIPFDEEKLEREVHNFAEDEYPCQYISNFYKEYGVYRGQCDLIFLKDNIRELKKILITQQKYHSKLTDEVVDNILDIIKSKREFWEGPGAPKENQLSPYGRYRTLEDLEKYKKDSNYHKYLYEMLIGKCELSMGRDGSIDNVAPKCNYYAEEFNFYNDFINMSVKEPSQIDEDYRNKITLKGKFIEETIEEFKKEILNAKTVSLEKLIKKVLGLELKDIQGYRIDKKYKPEISQFKFYKYLVNQFKNKNLNPTWLEDEDKTIYNQVIYVLTVAPSTYAVEDMLKERVKEIEFKKEEIDVLKNIKSKKNPDLNYHSLSESILKKALNDIKKYNCEYNFIQIMKKLEYEKEMKEYFQNNYSNKTEKPYTIEDRYIDNLIANPQVKKTLRKAIKVINAIIKEEKNYPEAIVIESATSLNSKERKKQIEEEQKTYDELNEEAKKELEVNGYETNDKNIQLLINWKETNESCIYCGKHISLKEVLTTEVEHILPKSKSMDNSHNNTTCSCLNCNKEKNNRTPYQYMTSQNKYESFKDCVIKKYDKMSQIKKSNLLFEGDIEKYSIKFINRNLRDTSYASVALVQELKKYNEYLEAKEGYKIHIVTSPGQLTSRIRRYLKMNKNRDYLYHHVVDAMILASIPDTEIGKVLIDAQNDNQYWFKHKDDEYKEKVYNMLDNVWLVNRDQIQKFNQDCDNMPEDNKDGLIKRSYEVSKNPVQQFIQYTEYTKYIKQDDSYYKISQIDNIYNLLIRKKDGSADKVKKDLDELFGLSNKKTKILLCEKKDPKLYQKLKDIYIKNASSINPFIDECKYMYGLEEGNQFNYLKHGIRKTDNPNSPLVIRLRYLEKVTNPYIKNTITTKRRNLYHEFTINQPKKNTLIGLDGLKQVSTSIFYAYEDKKFIFLPICAISFINGKLNEKENNYQTTYNRLIGNKKVTKIGNIYTGEWVGVYKKNGQYLEGRYKGYHKNNNCLEYYINGLDTLSCSTISSSDSRIIIYTTDILGNRYIRLDTDKII

SEQ ID NO: 421 - protein, 1090 aa, synthetic construct
  REGION 1..1090: note = MG87-19 effector
MTKNYSIGIDMGVNNVGWSILNNDTKKLENYGVRLFPTSNDAKERREVRNTRRRLKRKETRLDDTLYLLKKYGFNEDNTIEENLIEKRVKGLNEKLEKQDIVNILCYMIKHRGYIPFGDEEVTLVDLNGKYPCEFYYEMYKNGGKYRNRKMTVRITDNEKEIKKILETQSKYYKNINQDFINKYLNILTRKRKYWEGPGSINDLTPFGRFKTQEDVENYLEEKRKNPSYEKYIYEDLIKKCDYELEERCCCKLNIYYELFNMYQDFINVSFKNIEELENKDCFYETKNGLYKLNKKGLLMVKDYCMNNFKLKYTDILKKLFNTDKDNISGYRIDKDHKPEFSTLNSYRKIMLEFTEKGFDTTWVSNYNCYNEIMEKMTLTPGGVEFIKEIENNKLVPYKFNEEEKSLFKELKEYFNKKTLLSYGSLSQKILQKAINDMLDLEKNFMQVSRIKDYGKEARENFIKQYKKTSNKLEINASFVDDIIASPQVKKSLRQAIKIINAIIEKEGCLPVSIAIESTKELNSDKKKKEIEKEQKIQENLRKQASNYLSVVFGDSNATETNILKIMLYNETNGHCAYCNKPLNINDIFTDNIQVDHILPISKSFNDSFNNKIISCKKCNDDKKNNTPYQFLKNKNYFEEFEKRVLENKNISDYKKDNLLYKDDLDKYKTRFFNRNLRDTAYATTELINQIEIFNNYLEILDKKRINTLSVPGQITSSIRNRYVKNEDKTSLEKNRDAGVFHHAVDASIVVSVSDTHIGQIMLKAQNDKEYWIKNKSGYDDIYKYLINLRIDDTINQIEKINNENIKISKQVSKNPQGKLANSNIYKMIKKDNEQYIINQIDNIYTFDFKKDENKKLFEKLLNEENNEFTLLCYDNDKNTFNYIKKIYNEYKNEKGNPFVNYLIDKGEISDGNSLDYDITGIRMVTKKGNGPIIKRLRYYSKKNDLYILNKKNINKKDSNYLALDSLKQFCVKVYVDNDNKKFVFLPIYTISLDPKTKKVNENDEFYKLFYNKYIGNKNVTFFADIYNGNKLEITKKDGTIVSGYYSTFHKTHNYLVLNNDKGVMQSDKKISIIHTDILGNEKKRLTKEL

SEQ ID NO: 422 - protein, 1123 aa, synthetic construct
  REGION 1..1123: note = MG87-20 effector
MKKYTIGLDLGINNVGWAKYDLETKKVIDKGVVRFKESSTAQDRRIIRGSRRLRKRKQHRVERLAIQLSNINFCTSRSYEPELLNKRIKGLNESLSEQEITNIIYWFAIHRGYIPFDEEKPEREDHKFSEDEYPCQYIFDYYKEYGVYRGQCDLISLKDNLKELKQILLTQQKYHSKLTDEVIDNILYIIQSKREFWEGPGASKENQLSPYGRYRTLEDLEKYKADPTYHQYLYEMLIGKCELSIDKDGFMDQVAPKCNFYAEEFNFYNDFINMSVKEPSQIDEEYRNKITLKGKFTEDTIEEIKKEIISTKKVSLDKLVKKILGLELKDIQGYRIDKKYKPEISQFEFYKYLLKSFKDEKLNPSWLENDDKTIYNQIVYILTVAPSTYAIEDMLKDRVKEVEFKKEEIDVLIDIKKKKNPDLKYHSLSERILKKALDDIKRHNCEYNFMQIMKRLEYEKEMKEYFQNNYSTKTQSPYTIEDQYIDHLIANPQVKKTLRKAIKIINAIIKEEKNYPETIVIESATSLNSKERKKQIEEEQKTFNQLNKEVKKELEDNGYEVTDKNMQLLINWKETNESCIYCGESISLKEVLITEIEHILPKSKSMDNSHNNTTCSCLKCNKEKNNRTPYQYLTSNNMYEGFKNRVMNQYDKMSQDKKSNLLFEGDIDKYSIKFINRNLRDTSYASVALVQELKKYNEYLGAKEGYKINIITSPGQLTSKIRQYLKIKDKDRTYLYHHVVDAMILASIPDTEIGKVLIEAQNDSQYWFKDKNKENKYKEEVYNMLNNVWLSNRDQIQKFNQDCDNMPDNNKEGLIKRSYEVLKNPVRQFSQYTEYAKYIKQNDVYYKISQIDNIYNLLIRKKDGSADKDKKLLDELFDLSNKKNKTLLCEKKDPKLYQKLKNIYEKNSFSINPFVDESKYMYGLEDGDKFDCLKQGIRKTDNSNSPLVIKLRYLEKVTNPYIKNNITTRRKNLYNEFTINKPKKDTLIGLDGLKQVSTRIFYSYEDKKFIFLPICAISFVNGKLNKKEKNYQTTYNRLIGNKNVKEMGNIYVGEWVGVYKKNGEYFEGRYKGYHKTSNVLEYYINGLDTLSCATIGSSDLRIIIYTTDILGNRHIRLDTQKEI

SEQ ID NO: 423 - protein, 1098 aa, synthetic construct
  REGION 1..1098: note = MG87-21 effector
MKLEEELMKKYIIGLDLGINNVGWSVVNADTNEIESYGVRKFNASNGASDRRNYRNSRRRLKRKDTRKEDIFKILNEIHFPNILTIDTRLIETRCKGLNEKISKQDITNILSYMAVHRGYIPFGNEEVNFVNLNGKYPCECYCDKFLNSVNNKYRAERETVTNKDNEREIRKILEIQQNFYPEITSEVIEKIIKILGRKRKFWEGPGGINSLTSFGRFKTEEDVIKYQKQKEINPDYDKYIFEDLIGKCEVDPDKKCASNGNFYAEKFNLLNDFINVSFLNIDEINNKEDFYLTKDKTYKLKESGLNKVFEYCINKENITIKGLLKDLFATNVNNMTGFRQKDHDPKKPDMSTMNMFRAFRKIFAKNNANMKIFDIKNIEKYNEIINYIMLVPGNVELINMVSSMVMSLTKNDERALKEIFKSKVKLKYHSLCEDILKRACNDMLSLQKNYMQVYKIKDYGKKSRELFIAKYDEQNKGKLQLNSCFIDDIIASPQVKKTLRQAEKIINEIIKDKKTLPYAIAIESIKEELSGNEKKKMYTDINKKNKELHNKAEETLKSLGFDTNQITKKKITKIMLYEEFDGVCPYCNKAININNLINGADEIEHILPRSDSFNDSLDNRTISCADCNRKKGNKTPLQYLTGSEKESFVNRIKSNKNISEFKKNNFLFDGDISKYKTRFFNRNLRDTAYATKELVKQINIFNDYLEFKNNIDKIMTLSTPGQLTHDIRDRYNLEKDRDAGEKPYHHAVDASIVALLPTTSIGKKILEFQNDANFFIKPNSKSVMLDIGKELKYYNTKEEKIEYDDYIVDLKRIDDINPKFMFSSEINKEPNKQLFNANMYKVIKKEDKYYKIQQINDIYDSKIDLDLFEKLFDDSKNETLLCQSQHKEFYNKLKEIYQKYKDSGISPFEAYQREVNNLSKVDKFNYLIHGIKMSENGPVVKKLRYYTPISEPYLVDKKTINKKDNTYLAYDGLSQAGIEIYYNIDKNCLAFIPIPAIAVNLKTRVINHNHPMLERYRKKYLKDSNAKRIVTLFNGNTIEIYKAKGGVIKGEVSSFDKDANRIRLKDRSSFVTSDRGFSIIDYNPIGKAQKRLTFMIK

SEQ ID NO: 424 - protein, 1120 aa, synthetic construct
  REGION 1..1120: note = MG87-22 effector
MKKYTIGLDLGINNVGWAKYDLEAKKVIDKGIVRFKESSAAQDRRDRRGSRRLRKRRQHRVERLAVQLSNINFCTSRSYEPELLNKRIKGLNESLSEQEITNIIYWFAIHRGYIPFDEEKLEREVHNFAEDEYPCQYISNFYKEYGVYRGQCDLIFLKDNIRELKKILITQQKYHSKLTDEVVDNILDIIKSKREFWEGPGAPKENQLSPYGRYRTLEDLEKYKKDSNYHKYLYEMLIGKCELSIGRDGSIDNVAPKCNYYAEEFNFYNDFINMSVKEPSQIDEDYRNKITLKGKFTEETIEEFKKEILNAKTVSLEKLIKKVLGLELKDIQGYRIDKKYKPEISQFKFYKYLVNQFKNKNLNPTWLEDEDKTIYNQVIYVLTVAPSTYAVEDMLKERVKEIEFKKEEIDVLKNIKSKKNPDLNYHSLSESILKKALNDIKKYNCEYNFIQIMKKLEYEKEMKEYFQNNYSNKTEKPYTIEDRYIDNLIANPQVKKTLRKAIKVINAIIKEEKNYPEAIVIESATSLNSKERKKQIEEEQKTYDELNEEAKKELEVNGYETNDKNIQLLINWKETNESCIYCGKHISLKEVLTTEVEHILPKSKSMDNSHNNTTCSCLNCNKEKNNRTPYQYMTSQNKYESFKDCVIKKYDKMSQIKKSNLLFEGDIEKYSIKFINRNLRDTSYASVALVQELKKYNEYLEAKEGYKIHIVTSPGQLTSRIRRYLKMNKNRDYLYHHVVDAMILASIPDTEIGKVLIDAQNDNQYWFKHKDDEYKEKVYNMLDNVWLVNRDQIQKFNQDCDNMPEDNKDGLIKRSYEVSKNPVQQFIQYTEYTKYIKQDDSYYKISQIDNIYNLLIRKKDGSADKVKKDLDELFGLSNKKTKILLCEKKDPKLYQKLKDIYIKNASSINPFIDECKYMYGLEEGNQFNYLKHGIRKTDNPNSPLVIRLRYLEKVTNPYIKNTITTKRRNLYHEFTINQPKKNTLIGLDGLKQVSTSIFYAYEDKKFIFLPICAISFINGKLNEKENNYQTTYNRLIGNKKVTKIGNIYTGEWVGVYKKNGQYLEGRYKGYHKKNNCLEYYINGLDTLSCSTISSSDSRIIIYTTDILGNRYIRLDTDKII

SEQ ID NO: 425 - protein, 1091 aa, synthetic construct
  REGION 1..1091: note = MG87-23 effector
MKYIIGLDLGINNVGWSVVNAETNEIKSYGVKKFSISNGASDRRNFRNSRRRLKRKDTRKEDILKILNSINFPNNLTIDTKLIETRCKGLNEKISKQDITNILTYMAVHRGYIPYGDEEVSFVDLKGKYPCEYYRDKFLNSINNKYRAQRETVTSKDNEKEIRKVLKTQQEYYPEITEDVIERIIQTLNRKRKFWEGPGGLNSLTNFGRFKTEEDVTKYKEQKDINPEYEKYIFEDLIGRCEVDPDEKCASTDNFYAEKFNLLNDFINVSFLNIDEINNKEDFYLTNNKTYKLKESGLNRVFKYCLDKENVTIKGLLKDLFATTVNNMSGYRQKDHDSNKPDMSTMNTYRSIKKIFAKNNANMEIFKLENIDKYNEIINYFMLVPGNVELINMISSMVMPLYENDKDALKETFKSKRKKLRYHALCEKVLKRACNDMLSLQKNYMQVYKLKDYGKKSREIFIERYEKQNKGKLILNSSFIDDIVASPQVKKTLRQAEKVINEIVKDMKSLPYAIAIESAKEELSGNDKRNMYISMNKKNKELHDKAEKTLKSLGYDINQITKKKITKIMLYEEFNGLCPYCNKSININYLINGSDEIEHILPRSDSFNDSLDNRTISCADCNSKKENRTPLQYLNGSDKESFINRIKSNKNISELKKENFLFYGDLSKYKTRFFNRNLRDTAYATKELVRQINIFNNYLEFKNNGKKILTMSTPGQLTHDIRERYNLEKDRDAGERPFHHAVDASILALLPTTSIGKKIMKFQNDANFFIQDNSKKIMQDIGIELKYYNTKDDKIEYDDYIKDLKEISDTNPKFMYSPEVNKDPNKKLFNANLYKVIKKEDKYYKIEQINDIYDYKVDLNLLEKLFDDSKNETLLCQSQHKEFYNKLKKIYEIYKDSDISPFEAYQREINNLSKEDEFDYITHGIRMSENGPVVKKLRYYTPINEPYLVNKKTINKKDTTYLAYDSLAQAGIEVYYNIDKNCFVFVPIPCTCYNFKTGKVNKKNNEYIKYYQKNIGTYNVQYKTTLYNGNTIEINKKDGSIIKGEVSYYHKTLDKIVLKSEQAFTKSDLGFSIIDYSPIGKCQKRLTFMIK

SEQ ID NO: 426 - protein, 68 aa, synthetic construct
  REGION 1..68: note = MG87-24 effector
MTLYNGNTIEVLKKDNTIIKGVVSSYHKTNDKIVLKNGSYFTKSDLEFSIIDYNPIGKSQKRLTKRIK

SEQ ID NO: 427 - protein, 1005 aa, synthetic construct
  REGION 1..1005: note = MG87-25 effector
MEKYIIGLDLGINNVGWSVVDAQTNKIKYLGVKQFEASDSAKDRRTQRNTRRRLKRRETRKTDILKILSNINFPNNLTIDTMLIETRCKGINEQISKQDITNILCYMATHRGYIPFGDEEVSFVDLDGKYPCEYYYEMFKSSTNNKYRALRNTVKNEENINEVKKMLETQRKYYPEITNETIENIVTTLQRKRKFWEGPGSINALTDYGRFKTPEDVVEYLDKKKENPEYEKYIFEDLIGKCSVIPNEKCVSQINFYAEKFNLLNDFINISFKSIEELNNKDDFYETQVKTYKLRESGLNKVFDYCMSKDTLTIKGLFKDLFATTIDNISGYRQDGHDPNKPEMSTMNTFRSIRKTFKECNANMDIFKPENTDLYNEIINYMMLVPGQVELINMLSTIMPLSENDKEALKKVFKSKKTNLKYHSLCEKILIRACNDMLSLQKNYMQVYKLKDYGKESRKEFVKRYEESNKGEKLMNPTFIDDIISSPQVKKTLRQSVKVINEIIKNEKSLPDVIVVESTKDTLNSEKMRKVYIDINKKQKALHDKAIKTLSSIGYSEKDISKKKIEKLMLYEEFDGLCPYCNNQITLKYLINGSDEIEHILPRSNSFDDSFDNRTVSCANCNKNKNNQTPLEFLKGNEKESFIERIKSNKNISEFKKENFLFAGDISKYRTRFFNRNLRDTAYATKEMINQINIFNLYLESKNKDEKIKTLSTPGQITHSIRKRYDLEKDRDTDIPYHHAIDASILALLPTTKIGSKVVMFQNDNKFFLNENNKDKMTEIGLELKYYDTSEGKIEYDDYIADFKNINDTSNIFMYSPEVKKEPNKGLFNANMYKVIKIDDKYYKIDQINDIYNLSDSDKKLLPKLFDDAKNETLLCKLQHKEFYEKLKNIYIKYSDSKNSPFEDYQREINNLSKEDKFDYLKHGLKMSENAPSVKRLRYYTPISEPYLIDKKSINKKDGTYLAFDSLAQAGIEVYYNETKNCFAFVPIPSVCYNLKTRKVNRKQN

SEQ ID NO: 428 - protein, 1123 aa, synthetic construct
  REGION 1..1123: note = MG87-26 effector
MKKYTIGLDLGINNVGWAKYDLETKKVIDKGVVRFKESSTAQDRRIIRGSRRLRKRKQHRVERLAIQLSNINFCTSRSYEPELLNKRIKGLNESLSEQEITNIIYWFAIHRGYIPFDEEKPEREVHKFAEDEYPCQYIFDYYKEYGVYRGQCDLISLKDNLKELKQILLTQQKYHSKLTDEVIDNILYIIQSKREFWEGPGASKENQLSPYGRYRTLEDLEKYKADPTYHQYLYEMLIGKCELSIDKDGFMDQVAPKCNFYAEEFNFYNDFINMSVKEPSQIDEEYRNKITLKGKFTEDTIEEIKKEIISTKKVSLDKLVKKILGLELKDIQGYRIDKKYKPEISQFEFYKYLLKSFKDEKLNPSWLENDDKTIYNQIVYILTVAPSTYAIEDMLKDRVKEVEFKKKEIDVLIDIKKKKNPDLKYHSLSERILKKALDDIKRHNCEYNFMQIMKRLEYEKEMKEYFQNNYSTKTQSPYTIEDQYIDHLIANPQVKKTLRKAIKIINAIIKEEKNYPETIVIESATSLNSKERKKQIEEEQKTFNQLNKEVKKELEDNGYEATDKNMQLLINWKETNESCIYCGESISLKEVLITEIEHILPKSKSMDNSHNNTTCSCLKCNKEKNNRTPYQYLTSKNMYEGFKNRVMNQYDKMSQDKKSNLLFEGDIDKYSIKFINRNLRDTSYASVALVQELKKYNEYLGAKEGYKINIITSPGQLTSKIRQYLKIKDKDRTYLYHHVVDAMILASIPDTEIGKVLIEAQNDSQYWFKDKNKENKYKEEVYNMLNNVWLSNRDQIQKFNQDCDNMPDNNKEGLIKRSYEVLKNPVRQFSQYTEYAKYIKQNDVYYKISQIDNIYNLLIRKKDGSADKDKKLLDELFDLSNKKNKTLLCEKKDPKLYQKLKNIYEKNSFSINPFVDESKYMYGLEDGDKFDCLKQGIRKTDNSNSPLVIKLRYLEKVTNPYIKNNITTRRKNLYNEFTINKPKKDTLIGLDGLKQVLTRIFYSYEDKKFIFLPICAISFVNGKLNKKEKNYQTTYNRLIGNKNVKEMGNIYVGEWVGVYKKNGEYFEGRYKGYHKTSNVLEYYINGLDTLSCATIGSSDLRIIIYTTDILGNRHIRLDTQKEI

SEQ ID NO: 429 - protein, 1077 aa, synthetic construct
  REGION 1..1077: note = MG87-27 effector
MEKNYDLSFGIDLGIASVGWSVFNLKENRILDKGVYLFSEAEKAEDRRGYRSVRRRKKRKLHRIERINILFNSKGISENNTYDSQLLEKRLLGVKEKITMQDIVNIIMYFARHRGYIPFKDEDERKSEIVDELRKQGLLACQIQEKIFEDNTKYRGDEYLIQHYDYVKELKTMLYEQKKYYKEIDEEFINGIIEIINSKRKFWEGPGGPRENQLNKYGRYRSLEDIERYNKDKNYNKYLFENLIGNCNIYANEKKASAWNFYAESFNFFNDMTNLKINIQDLDETNRMYFEKVDKETYKLKNTAITTLKDNVLNSSSVSYPKLFKKLFLVDFSQIYGYKKDKNGNPELAKFEQIRRLKNRLEDTKLIEELLCNMDAYNKAIYLIQVSPDKQTRYEILKDNLEEFYSDRLIELLSSCSLENRYHSFSEKALRKYLELMEEHNQNSSYIERNFSDEINPTREEKLINSYIGENIEKGNLKYINSKGIEDIIASPATKKSLRKAISIINKLFSKYGYPGYICIENTRELLSIDKQKEYENKTLDNNRKRETAKKKLEEAGYEASDINIDKYLLLNETNHKCAYCNKDITVSNCEIEHILPISKTANDTFLNKTVSCTQCNSLKNNRTPYEFLTSQNMYEDFKNRVQKNSKFDDKKKDNLLFEGNIDKYEKSFKNRNLNDTAYATNELANQIELFKKAYIRHNYGEILDTKVLKIPGQFTGIIRRKAKLDKNRDLKYHHAVDASIIASMPYLRVSKLIDMVQNEPNKYWQINNLSEYRDNLYDELYLNKTLKEALQKADYSNTRFAQEIQKKKNGQLFDANISKVVMKNNEYYKVEQIDNIYDLDYKDIEKYFTNSKTKKYFLCQDNDSKLYKKIYDIIEMYQGQKVNPFVEYCKENNMCENEKFDYRKYGIRKNDNSPVVAKLRFLTKVNTPYIMKNDKLIISQKQNKKAPMVMFDSLKQYCTRIYRDKESGKLLFMPILRIFVDNNSGEIRTDSDYYKVLFDTYVGKEEQDVEKYMDLFNNEYVRFYKNGEALGEGLVSCFHKTLNKIIIKNCNVSITPKIDIIEKIKSDILGLYNLNI

SEQ ID NO: 430 - protein, 1091 aa, synthetic construct
  REGION 1..1091: note = MG87-28 effector
MEKYIIGLDLGINNVGWSVVDAQTNKIKYLGVKQFEASDSAKDRRTQRNTRRRLKRRETRKTDILKILSNINFPSNLTIDTMLIETRCKGINEQISKQDITNILCYMATHRGYIPFGDEEVSFVDLDGKYPCEYYYEMFKSSTNNKYRALRNTVKNEENINEVKKMLETQRKYYPEITNETIENIVTTLQRKRKFWEGPGSINALTDYGRFKTPEDVVEYLDKKKENPEYEKYIFEDLIGKCSVIPNEKCVSQINFYAEKFNLLNDFINISFKSIEELNNKDDFYETQVKTYKLRESGLNKVFDYCMSKDTLTIKGLFKDLFATTIDNISGYRQDGHDPNKPEMSTMNTFRSIRKTFKECNANMDIFKPENTDLYNEIINYMMLVPGQVELINMLSTIMPLSENDKEALKKVFKSKKTNLKYHSLCEKILIRACNDMLSLQKNYMQVYKLKDYGKESRKEFVKRYEESNKGEKLMNPTFIDDIISSPQVKKTLRQSVKVINEIIKNEKSLPDVIVVESTKDTLNSEKMRKVYIDINKKQKALHDKAIKTLSSIGYSEKDISKKKIEKLMLYEEFDGLCPYCNNQITLKYLINGSDEIEHILPRSNSFDDSFDNRTVSCANCNKNKNNQTPLEFLKGNEKESFIERIKSNKNISEFKKENFLFAGDISKYRTRFFNRNLRDTAYATKEMINQINIFNLYLESKNKDEKIKTLSTPGQITHSIRKRYDLEKDRDTDIPYHHAIDASILALLPTTKIGSKVVMFQNDNKFFLNENNKDKMTEIGLELKYYDTSEGKIEYDDYIADFKNINDTSNIFMYSPEVKKEPNKGLFNANMYKVIKIDDKYYKIDQINDIYNLSDSDKKLLPKLFDDAKNETLLCKLQHKEFYEKLKNIYIKYSDSKNSPFEDYQREINNLSKEDKFDYLKHGLKMSENAPSVKRLRYYTPISEPYLIDKKSINKKDGTYLAFDSLAQAGIEVYYNETKNCFAFVPIPSVCYNLKTRKVNRKHKLYKRYKELNLKDYKVKYIVTLYNGNTIEVLKKDNTIIKGVVSSYHKTNDKIVLKNGSYFTKSDLEFSIIDYNPIGKSQKRLTKRIK

SEQ ID NO: 431 - protein, 1123 aa, synthetic construct
  REGION 1..1123: note = MG87-29 effector
MKKYTIGLDLGINNVGWAKYDLETKKVIDKGVVRFKESSTAQDRRIIRGSRRLRKRKQHRVERLAIQLSNINFCTSRSYEPELLNKRIKGLNESLSEQEITNIIYWFAIHRGYIPFDEEKPEREVHKFAEDEYPCQYIFDYYKEYGVYRGQCDLISLKDNLKELKQILLTQQKYHSKLTDEVIDNILYIIQSKREFWEGPGASKENQLSPYGRYRTLEDLEKYKADSTYHQYLYEMLIGKCELSIDKDGFMDQVAPKCNFYAEEFNFYNDFINMSVKEPSQIDEEYRNKITLKGKFTKDTIEEIKKEILNTKTVSLEKLVKKVLGLELKDIQGYRIDKKYKPEISKFEFYKYLLKSFKDKKLNPHWLENDDKTIYNQIIYILTVAPSTYAIEDMLKDRVKEVEFKKEEIDVLIDIKKKKNPDLKYHSLSERILKKALDDIKRHNCEYNFMQIMKRLEYEKEMKEYFQNNYSTKTQSPYTIEDQYIDHLIANPQVKKTLRKAIKVINAIIKKEKNYPETIVIESATSLNSKERKKQIKAEQKKYDKLNEEAKNELEANGYEATDKNMQLLINWKETNESCIYCGESISLKEVLTTEIEHILPKSKSMDNSHNNTTCSCLKCNKEKNNRTPYQYLTSENRYEGFKNRVMNQYDKMSQDKKSNLLFEGDIDKYSIKFINRNLRDTSYASVALVQELKKYNEYLGAKEGYKINIITSPGQLTSKIRQYLKIKDKDRTYLYHHVVDAMILASIPDTEIGKVLIEAQNDSQYWFKDKNKENKYKEEVYNMLNHVWLSNRDQIQKFNQDCDNMPEDNKDGLIKRSYEVLKNPIQQFSQYTEYAKYIKQDDGYYKILQVDNIYNLLIRKKDGSVDKDKQLLDELFDLSNKKTISLLCEKKDPKLYQKLKDIYIKNASSINPFVDECKYMYGLEEGDKFNYLKQGIRKTDNPNSPLVIRLRYLKRVTNPYIKNNITTRRKNVYNEFTINKPKKDTIIGLDGLKQVSTRIFYSYDDKKFIFLPICAISFVNGKLNKKEKNYQTTYNRLIGNKNVKEIGNIYTGEWVGVYKKNGEYLEGRYKGYHKTSNVLEYYINGLDTLSCVKICSSDLRIIIYTTDILGNRHIRLDTQKEI

SEQ ID NO: 432 - protein, 1091 aa, synthetic construct
  REGION 1..1091: note = MG87-30 effector
MKYIIGLDLGINNVGWSVVNAETNEIKSYGVKKFSISNGASDRRNFRNSRRRLKRKDTRKEDILKILNSINFPNNLTIDTKLIETRCKGLNEKISKQDITNILTYMAVHRGYIPYGDEEVSFVDLKGKYPCEYYRDKFLNSINNKYRAQRETVTSKDNEKEIRKVLKTQQEYYPEITEDVIERIIQTLNRKRKFWEGPGGLNSLTNFGRFKTEEDVTKYKEQKDINPEYEKYIFEDLIGRCEVDPDEKCASTDNFYAEKFNLLNDFINVSFLNIDEINNKEDFYLTNNKTYKLKESGLNRVFKYCLDKENVTIKGLLKDLFATTVNNMSGYRQKDHDSNKPDMSTMNTYRSIKKIFAKNNANMEIFKLENIDKYNEIINYFMLVTGNVELINMISSMVMPLYENDKDALKETFKSKRKKLRYHALCEKVLKRACNDMLSLQKNYMQVYKLKDYGKKSREIFIERYEKQNKGKLILNSSFIDDIVASPQVKKTLRQAEKVINEIVKDMKSLPYAIAIESAKEELSGNDKRNMYISMNKKNKELHDKAEKTLKSLGYDINQITKKKITKIMLYEEFNGLCPYCNKSININYLINGSDEIEHILPRSDSFNDSLDNRTISCADCNSKKENRTPLQYLNGSDKESFINRIKSNKNISELKKENFLFYGDLSKYKTRFFNRNLRDTAYATKELVRQINIFNNYLEFKNNGKKILTMSTPGQLTHDIRERYNLEKDRDAGERPFHHAVDASILALLPTTSIGKKIMKFQNDANFFIQDNSKKIMQDIGIELKYYNTKDDKIEYDDYIKDLKEISDTNPKFMYSPEVNKDPNKKLFNANLYKVIKKEDKYYKIEQINDIYDYKVDLNLLEKLFDDSKNETLLCQSQHKEFYNKLKKIYEIYKDSDISPFEAYQREINNLSKEDEFDYITHGIRMSENGPVVKKLRYYTPINEPYLVNKKTINKKDTTYLAYDSLAQAGIEVYYNIDKNCFVFVPIPCTCYNFKTGKVNKKNNEYIKYYQKNIGTYNVQYKTTLYNGNTIEINKKDGSIIKGEVSYYHKTLDKIVLKSEQAFTKSDLGFSIIDYSPIGKCQKRLTFMIK

SEQ ID NO: 433 - protein, 1091 aa, synthetic construct
  REGION 1..1091: note = MG87-31 effector
MKYIIGLDLGINNVGWSVVNAETNEIKSYGVKKFSISNGASDRRNFRNSRRRLKRKDTRKEDILKILNSINFPNNLTIDTKLIETRCKGLNEKISKQDITNILTYMAVHRGYIPYGDEEVSFVDLKEKYPCEYYRDKFLNSINNKYRAQRETVTSKDNEKEIRKVLKTQQEYYPEITEDVIERIIQTLNRKRKFWEGPGGLNSLTNFGRFKTEEDVTKYKEQKDINPEYEKYIFEDLIGRCEVDPDEKCASTDNFYAEKFNLLNDFINVSFLNIDEINNKEDFYLTNNKTYKLKESGLNRVFKYCLDKENVTIKGLLKDLFATTVNNMSGYRQKDHDSNKPDMSTMNTYRSIKKIFAKNNANMEIFKLENIDKYNEIINYFMLVPGNVELINMISSMVMPLYENDKDALKETFKSKRKKLRYHALCEKVLKRACNDMLSLQKNYMQVYKLKDYGKKSREIFIERYEKQNKGKLILNSSFIDDIVASPQVKKTLRQAEKVINEIVKDMKSLPYAIAIESAKEELSGNDKRNMYISMNKKNKELHDKAEKTLKSLGYDINQITKKKITKIMLYEEFNGLCPYCNKSININYLINGSDEIEHILPRSDSFNDSLDNRTISCADCNSKKGNRTPLQYLNGSDKESFINRIKSNKNISELKKENFLFYGDLTKYKTRFFNRNLRDTAYATKELVRQINIFNNYLEFKNNGKKILTMSTPGQLTHDIRERYNLEKDRDAGERPFHHAVDASILALLPTTSIGKKIMKFQNDANFFIQDNSKKIMQDIGIELKYYNTKDDKIEYDDYIKDLKEISDTNPKFMYSPEVNKDPNKKLFNANLYKVIKKEDKYYKIEQINDIYDYKVDLNLLEKLFDDSKNETLLCQSQHKEFYNKLKKIYEIYKDSGISPFEAYQREINSLSKEDEFDYITHGIRMSENGPVVKKLRYYTPINEPYLVNKKTINKKDTTYLAYDSLAQAGIEVYYNIDKNCFVFVPIPCTCYNFKTGKVNKENNEYIKYYQKNIGTYNVQYKTTLYNGNTIEINKKDGSIIKGEVSYYHKTLDKIVLKSEQAFTKSDLGFSIIDYSPIGKCQKRLTFMIK

SEQ ID NO: 434 - protein, 1091 aa, synthetic construct
  REGION 1..1091: note = MG87-32 effector
MAKNYSVGIDMGVNNVGWSILNNDTKQIEDYGVRLFPVSNDAKDRREARNTRRRLKRRETRLDDTLNLLKKYGFNEENTVDENLIEKRVKGLNEKLEKQDIVNILCYMTVHRGYIPFGDEKVTLIDLSGKYPCEFYYEMYKDSGKYRARNQTVKITDNVKEIKKLLETQSKYYGNITKSFIDDYVNIFTRKRKYWEGPGSVDDLTPFGRFKTEEDVEKYLEEKKNNPSYEKYIYEDLIKKCDYEIGERCCCKLNIYYELFNMYQDFVNVSFKNIDELENKECFYEAKNGLYKLNKKGLLMVKDYCMNNFNLKYTDIFKKLFNSDKDNISGYRIDKKHKPEFSTLNSYRKIMSEFTNRGFNTNWINDYNCYNEIMEKMTLTPGGVEFIKEIENNKLIPYKFSEEEKTLFKELKEYFNKNTLLSYGSLSQKVLQKAIDDMLDLEKNFMQVSRIKDYGKEARENFIKQYNSSGSDKLQINASFVDDIIASPQVKKSLRQAIKVINAIIEKEGCLPNSISIESTKELNSNEKKKEIEKDQNLQENLKKQASNYLSVTLGDKNCNESNILKVMLYNETNGHCMYCNKPLDINNILTDGVQIEHILPISKSFDDSFNNKAISCKDCNANKKNMTPYQYLNSSNRYEKFEKRVLDNKNISDIKKNNLLYKDDLDKYKTRFFNRNLRDTAYATKELINQIEIFNDYLEFKDEKRINTLSVPGQITSKIRKNYVKKDGKESLEKNRDDGVFHHAVDASIVVSVGNTRIGQVMLKAQNDKEYWINNKNSYDDIHKYLINLRIDDTIDQIEKINKDNTKISNQVSKNLQGKLFNSNIYKMIKKDNEQYIINQINNIYTFDFKKAENKKLFDKLLNEENNESTLLCYDKDRNTFNYIKKIYNEYKNEKGNPFVNYLIDKGEITDVKNFNYDITGIRMVTKKGNGPIIKRLRYYSRKNDLCMLNKKGINKKNNTYLALDSLKQHCVKVYVDNDKKNFVFLPIYIISLDPKTKKINENDEFYKLFYNKYIGNKNVTFFADIYNGNKLEITKKDGTVVNGYYSTFDKTNNKLILNNSSTFTQSDKKVSIIHTDILGNEKKRLTKEL

SEQ ID NO: 435 - protein, 1123 aa, synthetic construct
  REGION 1..1123: note = MG87-33 effector
MKKYTIGLDLGINNVGWAKYDLETKKVIDKGVVRFKESSTAQDRRIIRGSRRLRKRKQHRVERLAIQLSNINFCTSRSWEPELLNKRIKGLNESLSEQEITNIIYWFAIHRGYIPFDEEKPEREVHKFAEDEYPCQYIFDYYKEYGVYRGQCDLISLKDNLKELKQILLTQQKYHSKLTDEVIDNILYIIQSKREFWEGPGASKENQLSPYGRYRTLEDLEKYKADSTYHQYLYEMLIGKCELSIDKDGFMDQVAPKCNFYAEEFNFYNDFINMSVKEPSQIDEEYRNKITLKGKFTKDTIEEIKKEILNTKTVSLEKLVKKVLGLELKDIQGYRIDKKYKPEISKFEFYKYLLKSFKDKKLNPHWLENDDKTIYNQIIYILTVAPSTYAIEDMLKDRVKEVEFKKEEIDVLIDIKKKKNPDLKYHSLSERILKKALDDIKRHNCEYNFMQIMKRLEYEKEMKEYFQNNYSTKTQSPYTIEDQYIDHLIANPQVKKTLRKAIKVINAIIKKEKNYPETIVIESATSLNSKERKKQIKAEQKKYDKLNEEAKNELEANGYEATDKNMQLLINWKETNESCIYCGESISLKEVLTTEIEHILPKSKSMDNSHNNTTCSCLKCNKEKNNRTPYQYLTSENRYEGFKNRVMNQYDKMSQDKKSNLLFEGDIDKYSIKFINRNLRDTSYASVALVQELKKYNEYLGAKEGYKINIITSPGQLTSKIRQYLKIKDKDRTYLYHHVVDAMILASIPDTEIGKVLIEAQNDSQYWFKDKNKENKYKEEVYNMLNHVWLSNRDQIQKFNQDCDNMPEDNKDGLIKRSYEVLKNPIQQFSQYTEYAKYIKQDDGYYKILQVDNIYNLLIRKKDGSVDKDKQLLDELFDLSNKKTISLLCEKKDPKLYQKLKDIYIKNASSINPFVDECKYMYGLEEGDKFNYLKQGIRKTDNPNSPLVIRLRYLKRVTNPYIKNNITTRRKNVYNEFTINKPKKDTIIGLDGLKQVSTRIFYSYDDKKFIFLPICAISFVNGKLNKKEKNYQTTYNRLIGNKNVKEIGNIYTGEWVGVYKKNGEYLEGRYKGYHKTSNVLEYYINGLDTLSCVKICSSDLRIIIYTTDILGNRHIRLDTQKEI

SEQ ID NO: 436 - protein, 1123 aa, synthetic construct
  REGION 1..1123: note = MG87-34 effector
MKKYTIGLDLGINNVGWAKYDLETKKVIDKGVVRFKESSTAQDRRIIRGSRRLRKRKQHRVERLAIQLSNINFCTSRSYEPELLNKRIKGLNESLSEQEITNIIYWFAIHRGYIPFDEEKPEREDHKFAEDEYPCQYIFDYYKEYGVYRGQCDLISLKDNLKELKQILLTQQKYHSKLTDEVIDNILYIIQSKREFWEGPGASKENQLSPYGRYRTLEDLEKYKADPTYHQYLYEMLIGKCELSIDKDGFMDQVAPKCNFYAEEFNFYNDFINMSVKEPSQIDEEYRNKITLKGKFTEDTIEEIKKEIISTKKVSLDKLVKKILGLELKDIQGYRIDKKYKPEISQFEFYKYLLKSFKDEKLNPSWLENDDKTIYNQIVYILTVAPSTYAIEDMLKDRVKEVEFKKEEIDVLIDIKKKKNPDLKYHSLSERILKKALDDIKRHNCEYNFMQIMKRLEYEKEMKEYFQNNYSTKTQSPYTIEDQYIDHLIANPQVKKTLRKAIKIINAIIKEEKNYPETIVIESATSLNSKERKKQIEEEQKTFNQLNKEVKKELEDNGYEATDKNMQLLINWKETNESCIYCGESISLKEVLITEIEHILPKSKSMDNSHNNTTCSCLKCNKEKNNRTPYQYLTSKNMYEGFKNRVMNQYDKMSQDKKSNLLFEGDIDKYSIKFINRNLRDTSYASVALVQELKKYNEYLGAKEGYKINIITSPGQLTSKIRQYLKIKNKDRTYLYHHVVDAMILASIPDTEIGKVLIEAQNDSQYWFKDKNKENKYKEEVYNMLNNVWLSNRDQIQKFNQDCDNMPDNNKEGLIKRSYEVLKNPVRQFSQYTEYAKYIKQNDVYYKISQIDNIYNLLIRKKDGSADKDKKLLDELFDLSNKKNKTLLCEKKDPKLYQKLKNIYEKNSFSINPFVDESKYMYGLEDGDKFDCLKQGIRKTDNSNSPLVIKLRYLEKVTNPYIKNNITTRRKNLYNEFTINKPKKDTLIGLDGLKQVSTRIFYSYEDKKFIFLPICAISFVNGKLNKKEKNYQTTYNRLIGNKNVKEMGNIYVGEWVGVYKKNGEYFEGRYKGYHKTNNVLKYYINGLDTLSCATIGSSDLRIIIYTTDILGNRHIRLDTQKEI

SEQ ID NO: 437 - protein, 1123 aa, synthetic construct
  REGION 1..1123: note = MG87-35 effector
MKKYTIGLDLGINNVGWAKYDLETKKVIDKGVVRFKESSTAQDRRIIRGSRRLRKRKQHRVERLAIQLSNINFCTSRSYEPELLNKRIKGLNESLSEQEITNIIYWFAIHRGYIPFDEEKPEREVHKFAEDEYPCQYIFDYYKEYGVYRGQCDLISLKDNLKELKQILLTQQKYHSKLTDKVIDNILYIIQSKREFWEGPGASKENQLSPYGRYRTLEDLEKYKADSTYHQYLYEMLIGKCELSIDKDGFMDQVAPKCNFYAEEFNFYNDFINMSVKEPSQIDEEYRNKITLKGKFTEDTIEEIKKEIISTKKVSLDKLVKKILGLELKDIQGYRIDKKYKPEISQFEFYKYLLKSFKDKKLNPSWLENDDKTIYNQIVYILTVAPSTYAIEDMLKDRVKEVEFKKEEIDVLIDIKKKKNPDLKYHSLSERILKKALDDIKRHNCEYNFMQIMKRLEYEKEMKEYFQNNYSTKTQSPYTIEDQYIDHLIANPQVKKTLRKAIKIINAIIKEEKNYPETIVIESATSLNSKERKKQIEEEQKTFNQLNKEVKKELEDNGYEATDKNMQLLINWKETNESCIYCGESISLKEVLITEIEHILPKSKSMDNSHNNTTCSCLKCNKEKNNRTPYQYLTSKNMYEGFKNRVMNQYDKMSQDKKSNLLFEGDIDKYSIKFINRNLRDTSYASVALVQELKKYNEYLGAKKGYKINIITSPGQLTSKIRQYLKIKDKDRTYLYHHVVDAMILASIPDTEIGKVLIEAQNDSQYWFKDKNKENKYKEEVYNMLNNVWLSNRDQIQKFNQDCDNMPDNNKEGLIKRSYEVLKNPVRQFSQYTEYAKYIKQNDVYYKISQIDNIYNLLIRKKDGSADKDKKLLDELFDLSNKKNKTLLCEKKDPKLYQKLKNIYEKNSFSINPFVDECKYMYGLEDGDKFDCLKQGIRKTDNSNSPLVIKLRYLEKVTNPYIKNNITTRRKNLYNEFTINKPKKDTLIGLDGLKQVSTRIFYSYEDKKFIFLPICAISFVNGKLNKKEKNYQTTYNRLIGNKNVKEMGNIYVGEWVGVYKKNGEYFEGRYKGYHKTSNVLEYYINGLDTLSCATIGSNDLRIIIYTTDILGNRHIRLDTQKEI

SEQ ID NO: 438 - protein, 1123 aa, synthetic construct
  REGION 1..1123: note = MG87-36 effector
MKKYTIGLDLGINNVGWAKYDLETKKVIDKGVVRFKESSTAQDRRIIRGSRRLRKRKQHRVERLAIQLSNINFCTSRSWEPELLNKRIKGLNESLSEQEITNIIYWFAIHRGYIPFDEEKPEREVHKFAEDEYPCQYIFDYYKEYGVYRGQCDLISLKDNLKELKQILLTQQKYHSKLTDHVIDNILYIIQSKREFWEGPGASKENQLSPYGRYRTLEDLEKYKADPTYHQYLYEMLIGKCELSIDKDGFMDQVAPKCNFYAEEFNFYNDFINMSVKEPSQIDEEYRNKITLKGKFTKDTIEEIKKEILNTKTVSLEKLVKKVLGLELKDIQGYRIDKKYKPEISKFEFYKYLLKSFKDKKLNPHWLENDDKTIYNQIIYILTVAPSTYAIEDMLKDRVKEVEFKKEEIDVLIDIKKKKNPDLKYHSLSERILKKALDDIKRHNCEYNFMQIMKRLEYEKEMKEYFQNNYSTKTQSPYTIEDQYIDHLIANPQVKKTLRKAIKVINAIIKKEKNYPETIVIESATSLNSKERKKQIKAEQKKYDKLNEEAKNELEANGCEATDKNMQLLINWKETNESCIYCGESISLKEVLTTEIEHILPKSKSMDNSHNNTTCSCLKCNKEKNNRTPYQYLTSENRYEGFKNRVMNQYDKMSQDKKSNLLFEGDIDKYSIKFINRNLRDTSYASVALVQELKKYNEYLGAKEGYKINIITSPGQLTSKIRQYLKIKDKDRTYLYHHVVDAMILASIPDTEIGKVLIEAQNDSQYWFKDKNKENKYKEEVYNMLNHVWLSNRDQIQKFNQDCDNMPEDNKDGLIKRSYEVLKNPIQQFSQYTEYAKYIKQDDGYYKILQVDNIYNLLIRKKDGSVDKDKQLLDELFDLSNKKTISLLCEKKDPKLYQKLKDIYIKNASSINPFVDECKYMYGLEEGDKFNYLKQGIRKTDNPNSPLVIRLRYLKRVTNPYIKNNITTRRKNVYNEFTINKPKKDTIIGLDGLKQVSTRIFYSYDDKKFIFLPICAISFVNGKLNKKEKNYQTTYNRLIGNKNVKEIGNIYTGEWVGVYKKNGEYFEGRYKGYHKTSNVLEYYINGLDTLSCAKICSSDLRIIIYTTDILGNRHIRLDTQKEI

SEQ ID NO: 439 - protein, 1091 aa, synthetic construct
  REGION 1..1091: note = MG87-37 effector
MKYIIGLDLGINNVGWSVVNAETNEIKSYGVKKFSISNGASDRRNFRNSRRRLKRKDTRKEDILKILNSINFPNNLTIDTKLIETRCKGLNEKISKQDITNILTYMAAHRGYIPYGDEEVSFVDLKGKYPCEYYRDKFLNSINNKYRAQRETVTSKDNEKEIRKVLKTQQEYYPEITEDVIERIIQTLNRKRKFWEGPGGLNSLTNFGRFKTEEDVTKYKEQKDINPEYEKYIFEDLIGRCEVDPDEKCASTDNFYAEKFNLLNDFINVSFLNIDEINNKEDFYLTNNKTYKLKESGLNRVFKYCLDKENVTIKGLLKDLFATTVNNMSGYRQKDHDSNKPDMSTMNTYRSIKKIFAKNNANMEIFKLENIDKYNEIINYFMLVPGNVELINMISSMVMPLYENDKDALKETFKSKRKKLRYHALCEKVLKRACNDMLSLQKNYMQVYKLKDYGKKSREIFIERYEKQNKGKLILNSSFIDDIVASPQVKKTLRQAEKVINEIVKDMKSLPYAIAIESAKEELSGNDKRNMYISMNKKNKELHDKAEKTLKSLGYDINQITKKKITKIMLYEEFNGLCPYCNKSININYLINGSDEIEHILPRSDSFNDSLDNRTISCADCNSKKENRTPLQYLNGSDKESFINRIKSNKNISELKKENFLFYGDLSKYKTRFFNRNLRDTAYATKELVRQINIFNNYLEFKNNGKKILTMSTPGQLTHDIRERYNLEKDRDAGERPFHHAVDASILALLPTTSIGKKIMKFQNDANFFIQDNSKKIMQDIGIELKYYNTKDDKIEYDDYIKDLKEISDTNPKFMYSPEVNKDPNKKLFNANLYKVIKKEDKYYKIEQINDIYDYKVDLNLLEKLFDDSKNETLLCQSQHKEFYNKLKKIYEIYKDSDISPFEAYQREINNLSKEDEFDYITHGIRMSENGPVVKKLRYYTPINEPYLVNKKTINKKDTTYLAYDSLAQAGIEVYYNIDKNCFVFVPIPCTCYNFKTGKVNKKNNEYIKYYQKNIGTYNVQYKTTLYNGNTIEINKKDGSIIKGEVSYYHKTLDKIVLKSEQAFTKSDLGFSIIDYSPIGKCQKRLTFMIK

SEQ ID NO: 440 - protein, 1091 aa, synthetic construct
  REGION 1..1091: note = MG87-38 effector
MEKYIIGLDLGINNVGWSVVDAQTNKIKYLGVKQFEASDSAKDRRTQRNTRRRLKRRETRKTDILKILSNINFPNNLTIDTMLIETRCKGINEQISKQDITNILCYMATHRGYIPFGDEEVSFVDLDGKYPCEYYYEMFKSSTNNKYRALRNTVKNEENINEVKKMLETQRKYYPEITNETIENIVTTLQRKRKFWEGPGSINALTDYGRFKTPEDVVEYLDKKKENPEYEKYIFEDLIGKCSVIPNEKCVSQINFYAEKFNLLNDFINISFKSIEELNNKDDFYETQVKTYKLRESGLNKVFDYCMSKDTLTIKGLFKDLFATTIDNISGYRQDGHDPNKPEMSTMNTFRSIRKTFKECNANMDIFKPENTDLYNEIINYMMLVPGQVELINMLSTIMPLSENDKEALKKVFKSKKTNLKYHSLCEKILIRACNDMLSLQKNYMQVYKLKDYGKESRKEFVKRYEESNKGEKLMNPTFIDDIISSPQVKKTLRQSVKVINEIIKNEKSLPDVIVVESTKDTLNSEKMRKVYIDINKKQKALHDKAIKTLSSIGYSEKDISKKKIEKLMLYEEFDGLCPYCNNQITLKYLINGSDEIEHILPRSNSFDDSFDNRTVSCANCNKNKNNQTPLEFLKGNEKESFIERIKSNKNISEFKKENFLFAGDISKYRTRFFNRNLRDTAYATKEMINQINIFNLYLESKNKDEKIKTLSTPGQITHSIRKRYDLEKDRDTDIPYHHAIDASILALLPTTKIGSKVVMFQNDNKFFLNENNKDKMTEIGLELKYYDTSEGKIEYDDYIADFKNINDTSNIFMYSPEVKKEPNKGLFNANMYKVIKIDDKYYKIDQINDIYNLSDSDKKLLPKLFDDAKNETLLCKLQHKEFYEKLKNIYIKYSDSKNSPFEDYQREINNLSKEDKFDYLKHGLKMSENAPSVKRLRYYTPISEPYLIDKKSINKKDGTYLAFDSLAQAGIEVYYNETKNCFAFVPIPSVCYNLKTRKVNRKHKLYKRYKELNLKDYKVKYIVTLYNGNTIEVLKKDNTIIKGVVSSYHKTNDKIVLKNGSYFTKSDLEFSIIDYNPIGKSQKRLTKRIK

SEQ ID NO: 441 - protein, 1074 aa, synthetic construct
  REGION 1..1074: note = MG87-39 effector
MNKYIIGIDLGINNVGWSIINSETKEIEKCGVRLFSPSEKADERRGYRAARRLKKRKKNREEDILKILNKINFPNKSIDSTLIYKRNKGLSQQIEKQDITNIICYYATHRGYIPFGDEERELVDLQGKLACQHYLNLYENSGQYRALNEVVDHNEIVREYDEIIKEQIKYYPELKEVSDKIKEIISRKRKFWEGPGSIKSFTKYGRFKNKEDVRLYKESGNEKYLYEELIKKCQIYINEKVVSKSNYYYEEYKLLNDFINTKIKDIEDITRQDCIEEVENRKGTEKLYKLNLKGLELIIDYCKNNLNLRWDSIYKKLFNITKENLVGYRINKTSEPDFSTLNTYRKVKKCFKEFDSTWIDNIDEYNEIIHILATAPGIIEIRKMIEKSEIIKYLFSEEEYKKLKDLKGKLVKDQSLTYGEFSEKGLKRAINDMKNLLENYQYVSKKYNYQEEMNEYIVKEYKDTDGILKLPTQFVDEIIASPQVKKSLKQAIKVINAIIDEKEDYPEVIAIESTKEMNTKEKAKELTLEQALNEKRRVKAKEELERYFDDEYITEINIEKAMLYMELDGRCPYCNQAFKGGMNSIINSNLEIEHILPISKTKDDGYNNKTLSCNKCNAEKKDRSPYQWKKNNFKEFSNRINNLKISDDKKKHFLEERDLNLYSIKFIQRNLRDTAYGTKELVNQIHMFNKIIKDRLNNVEPIKTLSTPGQLTSNIRKKYNISKDRDEKFHHAVDASIVASIAATSYIGKKIIESQNDKKFWLDEDKKKALEELEIRNVKISTVEKLKAINSDNDIYKSNQVSKDPYKSFQKSPNISKYLKINDIYYKVSQINNIYEPNASEIKNLKKILGESKELHSMIEDNNKKMYNLLKEIFKTYGEMTEKNNPFANYCIEINGIQKEEFDYKKHGIKQENGPLIKKLRYYSKVNNPELINKKNIDKKDNTYIGLDGVGQYCTKIYWDRNNNEFIFMPIYLTSIDLSTKKINKNSSTYKYYYNTYLKGKNYQFITDVYNGDLIEVEKKDTIIKNYVSCYHKGAHNCIELKNKGSFNVSDKAFKIIDTDYLGNEKIRLTWPKK

SEQ ID NO: 442 - protein, 1091 aa, synthetic construct
  REGION 1..1091: note = MG87-40 effector
MEKYIIGLDLGINNVGWSVVDAQTNKIKYLGVKQFEASDSAKDRRTQRNTRRRLKRRETRKTDILKILSNINFPSNLTIDTMLIETRCKGINEQISKQDITNILCYMATHRGYIPFGDEEVSFVDLDGKYPCEYYYEMFKSSTNNKYRALRNTVKNEENINEVKKMLETQRKYYPEITNETIENIVTTLQRKRKFWEGPGSINALTDYGRFKTPEDVVEYLDKKKENPEYEKYIFEDLIGKCSVIPNEKCVSQINFYAEKFNLLNDFINISFKSIEELNNKDDFYETQVKTYKLRESGLNKVFDYCMSEDTLTIKGLFKDLFATTIDNISGYRQDGHDPNKPEMSTMNTFRSIRKTFKECNANMDIFKPENTDLYNEIINYMMLVPGQVELINMLSTIMPLSENDKEALKKVFKSKKTNLKYHSLCEKILIRACNDMLSLQKNYMQVYKLKDYGKESRKEFVKRYEESNKGEKLMNPTFIDDIISSPQVKKTLRQSVKVINEIIKNEKSLPDVIVVESTKDTLNSEKMRKVYIDINKKQKALHDKAIKTLSSIGYSEKDISKKKIEKLMLYEEFDGLCPYCNNQITLKYLINGSDEIEHILPRSNSFDDSFDNRTVSCANCNKNKNNQTPLEFLKGNEKESFIERIKSNKNISEFKKENFLFAGDISKYRTRFFNRNLRDTAYATKEMINQINIFNLYLESKNKDEKIKTLSTPGQITHSIRKRYDLEKDRDTDIPYHHAIDASILALLPTTKIGSKVVMFQNDNKFFLNENNKDKMTEIGLELKYYDTSEGKIEYDDYIADFKNINDTSNIFMYSPEVKKEPNKGLFNANMYKVIKIDDKYYKIDQINDIYNLSDSDKKLLPKLFDDAKNETLLCKLQHKEFYEKLKNIYIKYSDSKNSPFEDYQREINNLSKEDKFDYLKHGLKMSENAPSVKRLRYYTPISEPYLIDKKSINKKDGTYLAFDSLAQAGIEVYYNETKNCFAFVPIPSVCYNLKTRKVNRKHKLYKRYKELNLKDYKVKYIVTLYNGNTIEVLKKDNTIIKGVVSSYHKTNDKIVLKNGSYFTKSDLEFSIIDYNPIGKSQKRLTKRIK

SEQ ID NO: 443 - protein, 1091 aa, synthetic construct
  REGION 1..1091: note = MG87-41 effector
MKYIIGLDLGINNVGWSVVNAETTEIKSYGVKKFSTSNGASDRRNFRNSRRRLKRKDTRKEDVLKILNGINFPNNLTIDTKLIETRCKGLNEKISKQDITNILAYMAVHRGYIPFGNEEVSFVDLKGKYPCEYYRDKLLNSINNKYRAQRETVKNKDNEKEIRKILKTQQEYYPEITNDIIEKLIETLNRKRKFWEGPGGLNSLTSFGRFKTDEDVIKYKEQKDKNPDYEKYIFEDLIGKCEVDPDEKCASTGNFYAEKFNLLNDFINVSFLSIDEINNKEDFYLTDNKTYKLKETGLNKVFEYCLEKENITIKGLLKDLFATSVNNMSGFRQKDHDPNKPDMSTMNIYRSVKKIFAKNNANMDIFKLDNIDKYNDIINYLMLVPGNVELINMISSMVMSLTENDENALKEAFKSKGKDLRYHALCEKILKRACNDMQSLQKNYMQVYKLKDYGKKSRELFIRKYEEQNKDKLLLNSSFIDDIVASPQVKKTLRQAEKVINEIVKDMKSLPYAIAVESTKEELSGNDKRNMYIAMNKKNKELHDKAEETLKSLGYDINQITKKKITKIMLYEEFNGLCPYCGKSININSLINGSDEIEHILPRSDSFNDSLDNRTISCADCNSKKGNKTPLQYLTGSDKESFINRIKSNKNISELKKSNFLFDGDISKYRTRFFNRNLRDTAYATKELIKQINIFNNYLEFKSNSKKILTMSTPGQLTHDIRERYNLEKERDAGQKPFHHAVDASIVALLPTTSIGKKILNFQNNDNFFISQDSKKIMQDIGTELKYYDTKKDKIEYDDYIKDLKTISDTNPKFMYSPEVNKEPNKQLFNANMYKLIKKEDKYYKIEQIDNIYEPKLDLALLEKLFDDSKNETLLCQAQHQDFYSKLKKIYFEYKDSNISPFEAYQREVNNLSKEDKFDYLIHGIKMSQNGPVVKKLRYYTPISEPYLIDKKSINKKNNTYLAYDGLAQAGIEVYYNIDKNTLVFVPIPSIAVNLKNRAINYQHPVLVKYCKKYLNDCNAKRIVTLFNGNTIEVYKSKGNIVKGEVSSFDKNSNRIRLRDGSSFVTSDRGFSVIDYSPIGKSQKRLTFMIK

SEQ ID NO: 444 - protein, 1123 aa, synthetic construct
  REGION 1..1123: note = MG87-42 effector
MKKYTIGLDLGINNVGWAKYDLETKKVIDKGVVRFKESSTAQDRRIIRGSRRLRKRKQHRVERLAIQLSNINFCTSRSYEPELLNKRIKGLNESLSEQEITNIIYWFAIHRGYIPFDEEKPEREVHKFAEDEYPCQYIFDYYKEYGVYRGQCDLISLKDNLKELKQILLTQQKYHSKLTDEVIDNILYIIQSKREFWEGPGASKENQLSPYGRYRTLEDLEKYKADSTYHQYLYEMLIGKCELSIDKDGFMDQVAPKCNFYAEEFNFYNDFINMSVKEPSQIDEEYRNKITLKGKFTEDTIEEIKKEIISTKKVSLDKLVKKILGLELKDIQGYRIDKKYKPEISQFEFYKYLLKSFKDEKLNPSWLENDDKTIYNQIVYILTVAPSTYAIEDMLKDRVKEVEFKKEEIDVLIDIKKKKNPDLKYHSLSERILKKALDDIKRHNCEYNFMQIMKRLEYEKEMKEYFQNNYSTKTQSPYTIEDQYIDHLIANPQVKKTLRKAIKIINAIIKEEKNYPETIVIESATSLNSKERKKQIEEEQKTFNQLNKEVKKELEDNGYEVTDKNMQLLINWKETNESCIYCGESISLKEVLITEIEHILPKSKSMDNSHNNTTCSCLKCNKEKNNRTPYQYLTSKNMYEGFKNRVMNQYDKMSQDKKSNLLFEGDIDKYSIKFINRNLRDTSYASVALVQELKKYNEYLGAKEGYKINIITSPGQLTSKIRQYLKIKDKDRTYLYHHVVDAMILASIPDTEIGKVLIEAQNDSQYWFKDKNKENKYKEEVYNMLNNVWLSNRDQIQKFNQDCDNMPDNNKEGLIKRSYEVLKNPVRQFSQYTEYAKYIKQNDVYYKISQIDNIYNLLIRKKDGSADKDKKLLDELFDLSNKKNKTLLCEKKDPKLYQKLKNIYEKNSFSINPFVDECKYMYGLEDGDKFDCLKQGIRKTDNSNSPLVIKLRYLEKVTNPYIKNNITTRRKNLYNEFTINKPKKDTLIGLDGLKQVSTRIFYSYEDKKFIFLSICAISFVNGKLNKKEKNYQTTYNRLIGNKNVKEMGNIYVGEWVGVHKKNGEYFEGRYKGYDKTSNVLKYYINGLDTLSCATIGSSDLRIIIYTTDILGNRHIRLDTQKEI

SEQ ID NO: 445 - protein, 1090 aa, synthetic construct
  REGION 1..1090: note = MG87-43 effector
MTKNYSIGIDMGVNNVGWSILNNDTKKLENYGVRLFPTSNDAKERREVRNTRRRLKRKETRLDDTLYLLKKYGFNEDNTIEENLIEKRVKGLNEKLEKQDIVNILCYMIKHRGYIPFGDEEVTLVDLNGKYPCEFYYEMYKNGGKYRNRKMTVRITDNEKEIKKILETQSKYYKNINQDFINKYLNILTRKRKYWEGPGSINDLTPFGRFKNQEDVENYLEEKRKNPSYEKYIYEDLIKKCDYELEERCCCKLNIYYELFNMYQDFINVSFKNIEELENKDCFYETKNGLYKLNKKGLLMVKDYCMNNFKLKYTDILKKLFNTDKDNISGYRIDKDHKPEFSTLNSYRKIMLEFTEKGFDTTWVSDYNCYNEIMEKMTLTPGGVEFIKEIENNKLVPYKFNEEEKSLFKELKEYFNKKTLLSYGSLSQKILQKAINDMLDLEKNFMQVSRIKDYGKEARENFIKQYKKTSNKLEINASFVDDIIASPQVKKSLRQAIKIINAIIEKEGCLPVSIAIESTKELNSDKKKKEIEKEQKIQENLRKQASNYLSAVFGDSNATETNILKVMLYNETNGHCAYCNKPLNINDIFTDNIQVDHILPISKSFNDSFNNKIISCKKCNDDKKNNTPYQFLKNKNYFEEFEKRVLENKNISDYKKDNLLYKDDLDKYKTRFFNRNLRDTAYATTELINQIEIFNNYLEILDKKRINTLSVPGQITSSIRNRYVKNEDKTSLEKNRDAGVFHHAVDASIVVSVSDTHIGQIMLKAQNDKEYWIKNKSGYDDIYKYLMNLRIDDTINQIEKINNENIKISKQVSKNPQGKLANSNIYKMIKKDNGQYIINQIDNIYTFDFKKDENKKLFEKLLNEENNEFTLLCYDNDKNTFNYIKKIYNEYKNEKGNPFVNYLIDKGEISDGNSLDYDITGIRMVTKKGNGPIIKRLRYYSKKNDLYILNKKNINKKDSNYLALDSLKQFCVKVYVDNDNKKFVFLPIYTISLDPKTKKVNENDEFYKLFYNKYIGNKNVTFFADIYNGNKLEITKKDGTIVSGYYSTFNKSANRLETQNGYIFVCSDKKISIIHTDILGNEKKRLTKEL

SEQ ID NO: 446 - protein, 1098 aa, synthetic construct
  REGION 1..1098: note = MG87-44 effector
MKLEEELMKKYIIGLDLGINNVGWSVVNADTNEIESYGVRKFNASNGASDRRNYRNSRRRLKRKDTRKEDIFKILNEIHFPNILTIDTRLIETRCKGLNEKISKQDITNILSYMAVHRGYIPFGNEEVNFVNLNGKYPCEYYCDKFLNSVNNKYRAERETVTNKDNEREIRKILEIQQNFYPEITSEVIEKIIKILGRKRKFWEGPGGINSLTSFGRFKTEEDVIKYQKQKEINPDYDKYIFEDLIGKCEVDPDKKCASNGNFYAEKFNLLNDFINVSFLNIDEINNKEDFYLTKDKTYKLKESGLNKVFEYCINKENITIKGLLKDLFATNVNNMTGFRQKDHDPKKPDMSTMNMFRAFRKIFAKNNANMKIFDIKNIEKYNEIINYIMLVPGNVELINMVSSMVMSLTKNDEKALKEIFKSKVKLKYHSLCEDILKRACNDMLSLQKNYMQVYKIKDYGKKSRELFIAKYDEQNKGKLQLNSCFIDDIIASPQVKKTLRQAEKIINEIIKDKKTLPYAIAIESIKEELSGNEKKKMYTDINKKNKELHNKAEETLKSLGFDTNQITKKKITKIMLYEEFDGVCPYCNKAININNLINGADEIEHILPRSDSFNDSLDNRTISCADCNRKKGNKTPLQYLTGSEKESFVNRIKSNKNISEFKKNNFLFDGDISKYKTRFFNRNLRDTAYATKELVKQINIFNDYLEFKNNIDKIMTLSTPGQLTHDIRDRYNLEKDRDAGEKPYHHAVDASIVALLPTTSIGKKILEFQNDANFFIKPNSKSVMLDIGKELKYYNTKEEKIEYDDYIVDLKRIDDINPKFMFSSEINKEPNKQLFNANMYKVIKKEDKYYKIQQINDIYDSKIDLDLFEKLFDDSKNETLLCQSQHKEFYNKLKEIYQKYKDSGISPFEAYQREVNNLSKVDKFNYLIHGIKMSENGPVVKKLRYYTPISEPYLVDKKTINKKDNTYLAYDGLSQAGIEIYYNIDKNCLAFIPIPAIAVNLKTRVINHNHPMLERYRKKYLKDSNAKRIVTLFNGNTIEIYKAKGGVIKGEVSSFDKDANRIRLKDRSSFVTSDRGFSIIDYNPIGKAQKRLTFMIK

SEQ ID NO: 447 - protein, 1091 aa, synthetic construct
  REGION 1..1091: note = MG87-45 effector
MEKYIIGLDLGINNVGWSVVDAQTNKIKYLGVKQFEASDSAKDRRTQRNTRRRLKRRETRKTDILKILSNINFPNNLTIDTMLIETRCKGINEQISKQDITNILCYMATHRGYIPFGDGEVSFVDLDGKYPCEYYYEMFKSSTNNKYRALRNTVKNEENINEVKKMLETQRKYYPEITNETIENIVTTLQRKRKFWEGPGSINALTDYGRFKTPEDVVEYLEKKKENPEYEKYLFEDLIGKCSVIPNEKCASQINFYAEKFNLLNDFINISFKSIEELNNKDDFYETQVKTYKLRESGLNKVFDYCMSKDTLTIKGLFKDLFATTIDNISGYRQDGHDPNKPEMSTMNTFRTIRKTFKECNANMDIFKLENIDLYNEIINYMMLVPGQVELINMLSTIMPLSENDKEALKKVFKSKKADLKYHSLCEKILIRACNDMLSLQKNYMQVYKLKDYGKESRKEFVKRYEESNKGEKLMNPTFIDDIISSPQVKKTLRQSVKVINEIIKNEKSLPDVIVVESTKDTLNSEKMRKVYIDINKKQKALHDKAIKTLSSIGYSEKDISKKKIEKLMLYEEFDGLCPYCNNQITLKYLINGSDEIEHILPRSDSFDDSFDNRTVSCANCNKNKNNQTPLEFLKGNEKESFIERIKSNKNISEFKKENFLFAGDISKYRTRFFNRNLRDTAYATKEMINQINIFNLYLESKNKDEKIKTLSTPGQITHSIRKRYDLEKDRDTDIPYHHAIDASILALLPTTKIGSKVVMFQNDNKFFLNENNKDKMTEIGLELKYYDTSEGKIEYDDYIADFKNINDTSNIFMYSPEVKKEPNKGLFNANMYKVIKIDDKYYKIDQINDIYNLSDSDKKLLPKLFDDAKNETLLCKLQHKEFYEKLKNIYIKYSDSKNSPFEDYQREINNLSKEDKFDYLKHGLKMSENAPSVKRLRYYTPISEPYLIDKKSINKKDGTYLAFDSLAQAGIEVYYNETKNCFAFVPIPSVCYNLKTRKVNREHKLYKRYKELNLKDYKVKYIVTLYNGNTIEVLKKDNTIIKGVVSSYHKTNDKIVLKNGSYFTKSDLEFSIIDYNPIGKSQKRLTKRIK

SEQ ID NO: 448 - protein, 1091 aa, synthetic construct
  REGION 1..1091: note = MG87-46 effector
MKYIIGLDLGINNVGWSVVNAETNEIKSYGVKKFSISNGASDRRNFRNSRRRLKRKDTRKEDILKILNSINFPNNLTIDTKLIETRCKGLNEKISKQDITNILTYMAVHRGYIPYGDEEVSFVDLKGKYPCEYYRDKFLNSINNKYRAQRETVTSKDNEKEIRKVLKTQQEYYPEITEDVIERIIQTLNRKRKFWEGPGGLNSLTNFGRFKTEEDVTKYKEQKDINPEYEKYIFEDLIGRCEVDPDEKCASTDNFYAEKFNLLNDFINVSFLNIDEINNKEDFYLTNNKTYKLKESGLNRVFKYCLDKENVTIKGLLKDLFATTVNNMSGYRQKDHDSNKPDMSTMNTYRSIKKIFAKNNANMEIFKLENIDKYNEIINYFMLVPGNVELINMISSMVMPLYENDKDALKETFKSKRKKLRYHALCEKVLKRACNDMLSLQKNYMQVYKLKDYGKKSREIFIERYEKQNKGKLILNSSFIDDIVASPQVKKTLRQAEKVINEIVKDMKSLPYAIAIESAKEELSGNDKRNMYISMNKKNKELHDKAEKTLKSLGYDINQITKKKITKIMLYEEFNGLCPYCNKSININYLINGSDEIEHILPRSDSFNDSLDNRTISCADCNSKKENRTPLQYLNGSDKESFINRIKSNKNISELKKENFLFYGDLSKYKTRFFNRNLRDTAYATKELVRQINIFNNYLEFKNNGKKILTMSTPGQLTHDIRERYNLEKDRDAGERPFHHAVDASILALLPTTSIGKKIMKFQNDANFFIQDNSKKIMQDIGIELKYYNTKDDKIEYDDYIKDLKEISDTNPKFMYSPEVNKDPNKKLFNANLYKVIKKEDKYYKIEQINDIYDYKVDLNLLEKLFDDSKNETLLCQSQHKEFYNKLKKIYEIYKDSDISPFEAYQREINNLSKEDEFDYITHGIRMSENGPVVKKLRYYTPINEPYLVNKKTINKKDTTYLAYDSLAQAGIEVYYNIDKNCFVFVPIPCTCYNFKTGKVNKKNNEYIKYYPKNIGTYNVQYKTTLYNGNTIEINKKDGSIIKGEVSYYHKTLDKIVLKSEQAFTKSDLGFSIIDYSPIGKCQKRLTFMIK

SEQ ID NO: 449 - protein, 1090 aa, synthetic construct
  REGION 1..1090: note = MG87-47 effector
MTKNYSIGIDMGVNNVGWSILNNDTKKLENYGVRLFPTSNDAKERREVRNTRRRLKRKETRLDDTLYLLKKYGFNEDNTIEENLIEKRVKGLNEKLEKQDIVNILCYMIKHRGYIPFGDEEVTLVDLNGKYPCEFYYEMYKNGGKYRNRKMTVRITDNEKEIKKILETQSKYYKNINQDFINEYLNILTRKRKYWEGPGSINDLTPFGRFKTQEDVENYLEEKRKNPSYEKYIYEDLIKKCDYKLEERCCCKLNIYYELFNMYQDFINVSFKNIEELENKDCFYETKNGLYKLNKKGLLMVKDYCMNNFKLKYTDILKKLFNTDKDNISGYRIDKDHKPEFGTLNSYRKIMLEFTEKGFDTTWVSDYNCYNEIMEKMTLTPGGVEFIKEIENNKLVPYKFNEEEKSLFKELKEYFNKKTLLSYGSLSQKILQKAINDMLDLEKNFMQVSRIKDYGKEARENFIKQYKKTSNKLEINASFVDYIIASPQVKKSLRQAIKIINAIIEKEGCLPVSIAIESTKELNSDKKKKEIEKEQKVQENLRKQASNYLSAVFGDSNATETNILKVMLYNETNGHCAYCNKPLNINDIFTDNIQVDHILPISKSFNDSFNNKIISCKKCNDDKKNNTPYQFLKNKNYFEEFEKRVLENKNISDYKKDNLLYKDDLDKYKTRFFNRNLRDTAYATTELINQIEIFNNYLEILDKKRINTLSVPGQITSSIRNRYVKNEDKTSLEKNRDAGVFHHAVDASIVVSVSDTHIGQIMLKAQNDKEYWIKNKSGYDDIYKYLINLRIDDTINQIEKINNENIKISKQVSKNPQGKLANSNIYKMIKKDNGQYIINQIDNIYTFDFKKDENKKLFEKLLNEENNEFTLLCYDNDKNTFNYIKKIYNEYKNEKGNPFVNYLIDKGEISDGNSLDYDITGIRMVTKKGNGPIIKRLRYYSKKNDLYILNKKNINKKDGNYLALDSLKQFCVKVYVDNDNKKFVFLPIYTISLDPKTKKVNENDEFYKLFYNKYIGNKNVTFFADIYNGNKLEITKKDGTIVSGYYSTFHKTYNYLVLNNDKGVMQSDKKISIIHTDILGNEKKRLTKEL

SEQ ID NO: 450 - protein, 1091 aa, synthetic construct
  REGION 1..1091: note = MG87-48 effector
MKYIIGLDLGINNVGWSVVNAETTEIKSYGVKKFSTSNGASDRRNFRNSRRRLKRKDTRKEDVLKILNGINFPNNLTIDAKLIETRCKGLNEKISKQDITNILAYMAVHRGYIPFGNEEASFVDLKGKYPCEYYRDKLLNSINNKYRAQRETVKNKDNEKEIRKILKTQQEYYPEITNDTIEKLVETLNRKRKFWEGPGGLNSLTSFGRFKTDEDVIKYKEQKDKNPDYEKYIFEDLIGKCEVDPDEKCASTGNFYAEKFNLLNDFINVSFLSIDEINNKEDFYLTDNKTYKLKETGLNKVFEYCLEKENITIKGLLKDLFATSVNNISGFRQKDHDPNKPDMSTMNIYRSVKKIFVKNNANMDIFKLDNIDKYNDIINYLMLVPGNVELINMISSMVMSLTENDENALKEAFKSKGKDLRYHALCEKILKRACNDMQSLQKNYMQVYKLKDYGKKSRELFIRKYEEQNKDKLLLNSSFIDDIVASPQVKKTLRQAEKVINEIVKDMKSLPYAIAVESTKEELSGNDKRNMYIAMNKKNKELHDKAEETLKSLGYDINQITKKKITKIMLYEEFKGLCPYCGKSININSLINGSDEIEHILPRSYSFNDSLDNRTISCADCNSKKGNKTPLQYLTGSDKESFINRIKGNKNISELKKNNFLFDGDISKYRTRFFNRNLRDTAYATKELIKQINIFNNYLEFKSNNKKILTMSTPGQLTHDIRERYNLEKDRDAGQKPFHHAVDASIVALLPTTSIGKKILNFQNNDNFFISQDSKKIMQDIATELKYYDTKKDKIEYDDYIKDLKTISDTNPKFMYSPEVNKEPNKQLFNANMYKLIKKEDKYYKIEQIDNIYDPKLDLTLLEKLFDDSKNETLLCQAQHQDFYSKLKKIYFEYKDSNISPFEAYQREVNNLSKEEKFDYLIHGIKMSQNGPVVKKLRYYTPISEPYLIDKKSINKKNTTYLAYDSLAQAGIEIYYNIDKNCFAFVPIPCICYDFKTGKVNKEHPEYIKYFKKNIGNQNIEYKATLYNGNFIEINKKDGKTIKGEVSCYHKTYDRIDLKNGGLFTKSDQGFSIIDYSPTGKAQKRLTFMIK

SEQ ID NO: 451 - protein, 1091 aa, synthetic construct
  REGION 1..1091: note = MG87-49 effector
MKYIIGLDLGINNVGWSVVNAETNEIKSYGVKKFSISNGASDRRNFRNSRRRLKRKDTRKEDILKILNSINFPNNLTIDTKLIETRCKGLNEKISKQDITNILTYMAVHRGYIPYGDEEVSFVDLKGKYPCEYYRDKFLNSINNKYRAQRETVTSKDNEKEIRKVLKTQQEYYPEITEDVIERIIQTLNRKRKFWEGPGGLNSLTNFGRFKTEEDVTKYKEQKDINPEYEKYIFEDLIGRCEVDPDEKCASTDNFYAEKFNLLNDFINVSFLNIDEINNKEDFYLTNNKTYKLKESGLNRVFKYCLDKENVTIKGLLKDLFATTVNNMSGYRQKDHDSNKPDMSTMNTYRSIKKIFAKNNANMEIFKLENIDKYNEIINYFMLVPGNVELINMISSMVMPLYENDKDALKETFKSKRKKLRYHALCEKVLKRACNDMLSLQKNYMQVYKLKDYGKKSREIFIERYEKQNKGKLILNSSFIDDIVASPQVKKTLRQAEKVINEIVKDMKSLPYAIAIESAKEELSGNDKRNMYISMNKKNKELHDKAEKTLKSLGYDINQITKKKITKIMLYEEFNGLCPYCNKSININYLINGSDEIEHILPRSDSFNDSLDNRTISCADCNSKKENRTPLQYLNGSDKESFINRIKSNKNISELKKENFLFYGDLSKYKTRFFNRNLRDTAYATKELVRQINIFNNYLEFKNNGKKILPMSTPGQLTHDIRERYNLEKDRDAGERPFHHAVDASILALLPTTSIGKKIMKFQNDANFFIQDNSKKIMQDIGIELKYYNTKDDKIEYDDYIKDLKEISDTNPKFMYSPEVNKDPNKKLFNANLYKVIKKEDKYYKIEQINDIYDYKVDLNLLEKLFDDSKNETLLCQSQHKEFYNKLKKIYEIYKDSDISPFEAYQREINNLSKEDEFDYITHGIRMSENGPVVKKLRYYTPINEPYLVNKKTINKKDTTYLAYDSLAQAGIEVYYNIDKNCFVFVPIPCTCYNFKTGKVNKKNNEYIKYYQKNIGTYNVQYKTTLYNGNTIEINKKDGSIIKGEVSYYHKTLDKIVLKSEQAFTKSDLGFSIIDYSPIGKCQKRLTFMIK

SEQ ID NO: 452 - protein, 1123 aa, synthetic construct
  REGION 1..1123: note = MG87-50 effector
MKKYTIGLDLGINNVGWAKYDLETKKVIDKGVVRFKESSTAQDRRIIRGSRRLRKRKQHRVERLAIQLSNINFCTSRSYEPELLNKRIKGLNESLSEQEITNIIYWFAIHRGYIPFDEEKPEREVHKFAEDEYPCQYIFDYYKEYGVYRGQCDLISLKDNLKELKQILLTQQKYHSKLTDEVIDNILYIIQSKREFWEGPGASKENQLSPYGRYRTLEDLEKYKADPTYHQYLYEMLIGKCELSIDKDGFMDQVAPKCNFYAEEFNFYNDFINMSVKEPSQIDEEYRNKITLKGKFTEDTIEEIKKEIISTKKVYLDKLVKKILGLELKDIQGYRIDKKYKPEISQFEFYKYLLKSFKDEKLNPSWLENDDKTIYNQIVYILTVAPSTYAIEDMLKDRVKEVEFKKKEIDVLIDIKKKKNPDLKYHSLSERILKKALDDIKRHNCEYNFMQIMKRLEYEKEMKEYFQNNYSTKTQSPYTIEDQYIDHLIANPQVKKTLRKAIKIINAIIKEEKNYPETIVIESATSLNSKERKKQIEEEQKTFNQLNKEVKKELEDNGYEATDKNMQLLINWKETNESCIYCGESISLKEVLITEIEHILPKSKSMDNSHNNTTCSCLKCNKEKNNRTPYQYLTSKNMYEGFKNRVMNQYDKMSQDKKSNLLFEGDIDKYSIKFINRNLRDTSYASVALVQELKKYNEYLGAKEGYKINIITSPGQLTSKIRQYLKIKDKDRTYLYHHVVDAMILASIPDTEIGKVLIEAQNDSQYWFKDKNKENKYKEEVYNMLNNVWLSNRDQIQKFNQDCDNMPDNNKEGLIKRSYEVLKNPVRQFSQYTEYAKYIKQNDVYYKISQIDNIYNLLIRKKDGSADKDKKLLDELFDLSNKKNKTLLCEKKDPKLYQKLKNIYEKNSFSINPFVDESKYMYGLEDGDKFDCLKQGIRKTDNSNSPLVIKLRYLEKVTNPYIKNNITTRRKNLYNEFTINKPKKDTLIGLDGLKQVLTRIFYSYEDKKFIFLPICAISFVNGKLNKKEKNYQTTYNRLIGNKNVKEMGNIYVGEWVGVYKKNGEYFEGRYKGYHKTSNVLEYYINGLDTLSCATIGSSDLRIIIYTTDILGNRHIRLDTQKEI

SEQ ID NO: 453 - protein, 1090 aa, synthetic construct
  REGION 1..1090: note = MG87-51 effector
MTKNYSIGIDMGVNNVGWSILNNDTKKLENYGVRLFPTSNDAKERREVRNTRRRLKRKETRLDDTLYLLKKYGFNEDNTIEENLIEKRVKGLNEKLEKQDIVNILCYMIKHRGYIPFGDEEVTLVDLNGKYPCEFYYEMYKNGGKYRNRKMTVRITDNEKEIKKILEIQSKYYKNINQDFINKYLNILTRKRKYWEGPGSINDLTPFGRFKTQEDVENYLEEKRKNPSYEKYIYEDLIKKCDYELEERCCCKLNIYYELFNMYQDFINVSFKNIEELENKDCFYETKNGLYKLNKKGLLMVKDYCMNNFKLKYTDILKKLFNTDKDNISGYRIDKDHKPEFSTLNSYRKIMLEFTEKGFDTTWVSDYNCYNEIMEKMTLTPGGVEFIKEIENNKLVPYKFNEEEKSLFKELKEYFNKKTLLSYGSLSQKILQKAINDMLDLEKNFMQVSRIKDYGKEARENFIKQYKKTSNKLEINASFVDDIIASPQVKKSLRQAIKIINAIIEKEGCLPVSIAIESTKELNSDKKKKEIEKEQKIQENLRKQASNYLSAVFGDSNATETNILKVMLYNETNGHCAYCNKPLNINDIFTDNIQVDHILPISKSFNDSFNNKIISCKKCNDDKKNNTPYQFLKNKNYFEEFEKRVLENKNISDYKKDNLLYKDDLDKYKTRFFNRNLRDTAYATTELINQIEIFNNYLEILDKKRINTLSVPGQITSSIRNRYVKNEDKTSLEKNRDAGVFHHAVDASIVVSVSDTHIGQIMLKAQNDKEYWIKNKSGYDDIYKYLMNLRIDDTINQIEKINNENIKISKQVSKNPQGKLANSNIYKMIKKDNGQYIINQIDNIYTFDFKKDENKKLFEKLLNEENNEFTLLCYDNDKNTFNYIKKIYNEYKNEKGNPFVNYLIDKGEISDGSSLDYDITGIRMITKKGNGPIIKRLRYYSKKNDLYILNKKNINKKDSNYLALDSLKQFCVKVYVDNDNKKFVFLPVYTISLDPKTKKVNENDEFYKLFYNKYIGNKNVTFFADIYNGNKLEITKKDGTIVSGYYSTFHKTHNYLVLNNDKGVMQSDKKISIIHTDILGNEKKRLTKEL

SEQ ID NO: 454 - protein, 1123 aa, synthetic construct
  REGION 1..1123: note = MG87-52 effector
MKKYTIGLDLGINNVGWAKYDLETKKVIDKGVVRFKESSTAQDRRIIRGSRRLRKRKQHRVERLAIQLSNINFCTSRSYEPELLNKRIKGLNESLSEQEITNIIYWFAIHRGYIPFDEEKPEREVHKFAEDEYPCQYIFDYYKEYGVYRGQCDLISLKDNLKELKQILLTQQKYHSKLTDEVIDNILYIIQSKREFWEGPGASKENQLSPYGRYRTLEDLEKYKADPTYHQYLYEMLIGKCELSIDKDGFMDQVAPKCNFYAEEFNFYNDFINMSVKEPSQIDEEYRNKITLKGKFTEDTIEEIKKEIISTKKVSLDKLVKKILGLELKDIQGYRIDKKYKPEISQFEFYKYLLKSFKDEKLNPSWLENDDKTIYNQIVYILTVAPSTYAIEDMLKDRVKEVEFKKEEIDVLIDIKKKKNPDLKYHSLSERILKKALDDIKRHNCEYNFMQIMKRLEYEKEMKEYFQNNYSTKTQSPYTIEDQYIDHLIANPQVKKTLRKAIKIINAIIKEEKNYPETIVIESATSLNSKERKKQIEEEQKTFNQLNKEVKKELEDNGYEVTDKNMQLLINWKETNESCIYCGESISLKEVLITEIEHILPKSKSMDNSHNNTTCSCLKCNKEKNNRTPYQYLTSKNMYEGFKNRVMNQYDKMSQDKKSNLLFEGDIDKYSIKFINRNLRDTSYASVALVQELKKYNEYLGAKEGYKINIITSPGQLTSKIRQYLKIKDKDRTYLYHHVVDAMILASIPDTEIGKVLIEAQNDSQYWFKDKNKENKYKEEVYNMLNNVWLSNRDQIQKFNQDCDNMPDNNKEGLIKRSYEVLKNPVRQFSQYTEYAKYIKQNDVYYKISQIDNIYNLLIRKKDGSADKDKKLLDELFDLSNKKNKTLLCEKKDPKLYQKLKNIYEKNSFSINPFVDESKYMYGLEDGDKFDCLKQGIRKTDNSNSPLVIKLRYLEKVTNPYIKNNITTRRKNLYNEFTINKPKKDTLIGLDGLKQVSTRIFYSYEDKKFIFLPICAISFVNGKLNKKEKNYQTTYNRLIGNKNVKEMGNIYVGEWVGVYKKNGEYFEGRYKGYHKTNNVLKYYINGLDTLSCATIGSSDLRIIIYTTDILGNRHIRLDTQKEI

SEQ ID NO: 455 - protein, 1091 aa, synthetic construct
  REGION 1..1091: note = MG87-53 effector
MKKYIIGLDLGINNVGWSVVDAQTNKIKYLGVKQFEASDSAKDRRTQRNTRRRLKRRETRKTDILKILSNINFPNNLTIDTMLIETRCKGINEQISKQDITNILCYMATHRGYIPFGDGEVSFVDLEGKYPCEYYYEMFKSSTNNKYRALRNTVKNEENINEVKKMLETQRKYYPEITNETIENIVTTLQRKRKFWEGPGSINALTDYGRFKTPEDVVEYLDKKKENPEYEKYIFEDLIGKCSVIPNEKCASQINFYAEKFNLLNDFINISFKSIEELNNKDDFYETQVKTYKLRESGLNKVFNYCMSKDTLTIKGLFKDLFATTIDNISGYRQDGHDPNKPEMSTMNTFRSIRKTFKECNANMDIFKPENIDLYNEIINYMMLVPGQVELINMVSTIMSLSENDKEALKKVFKSKKTNLKYHSLCEKILIRACNDMLSLQKNYMQVYKLKDYGKESRKEFIKRYEESNKGEKLMNPTFIDDIISSPQVKKTLRQSVKVINEIIKNEKSLPDVIVVESTKDTLNSEKMRKVYIDINKKQKALHDKAIKTLSSIGYSEKDISKKKIEKLMLYEEFDGLCPYCNDPITLKYLINGSDEIEHILPRSDSFDDSFDNRTVSCANCNKNKNNQTPLEFLKGNEKESFIERIKSNKNISEFKKENFLFAGDISKYRTRFFNRNLRDTAYATKEMINQINIFNLYLESKNKDEKIKTLSTPGQITHSIRKRYDLEKDRDTDIPYHHAIDASILALLPTTKIGSKVVMFQNDNKFFLNENNKDKMTEIGLELKYYDTSEGKIEYDDYIADFKNINDTSNIFMYSPEVKKEPNKGLFNANMYKVIKIDDKYYKIDQINDIYNLSDSDKKLLPKLFDDAKNETLLCKLQHKEFYEKLKNIYIKYSDSKNSPFEDYQREINNLSKEDKFDYLKHGLKMSENAPSVKRLRYYTPISEPYLIDKKSINKKDGTYLAFDSLAQAGIEVYYNETKNCFAFVPIPSVCYNLKTRKVNREHKLYKRYKELNLKDYKVKYIVTLYNGNTIEVLKKDNTIIKGVVSNYHKTHDNIVLKNGSYFTKSDLEFSIIDYNPIGKSQKRLTKRIK

SEQ ID NO: 456 - protein, 165 aa, synthetic construct
  REGION 1..165: note = MG87-54 effector
MTKNYSIGIDMGVNNVGWSILNNDTKKLEDYGVRLFPTSNDAKERREVRNTRRRLKRKETRLDDTLYLLKKYGFNEDNTIEENLIEKRVKGLNEKLEKQDIVNILCYMIKHRGYIPFGDEEVTLVDLNGKYPCEFYYEMYKNGGKYRNRKMTVRITDNEKEIKKY

SEQ ID NO: 457 - protein, 1084 aa, synthetic construct
  REGION 1..1084: note = MG87-55 effector
MEKNYSIGIDMGINNVGWAVLNNSTKKIENYGVRLFKISESAADRRANRNTRRRLKRRETRFDDVLTLLKENGFKENNTIDEKLVEKRVKGLKEKISKQDIVNILCYMVKHRGYIPFGDDDVTLVELNGKFPCELYYEMLNNDGKYRNMQQTVRIIDNVHEIKQLLNTQSKFYEEINEDFINSYIDIFTRKRAYWEGPGSVNSLTPFGRFKNKEDVEEYINLQNNNPDYEKYIYEDLIKKCDIEINEQCCCKLNIYFELFNMYNDFINISFKNIEDLENKDCFYEAKNGLYKLNKKGLLLIKDYCMNNLNIKYSSIFSTLFKTNIDNVTGYRIDKEHKPEFSTLNNYRKIALEFEKKNFNKDWINDYDCYNEIMQKMVLTPGGVEFMKEIQNNKLIPYKFSYEEQELLKSLKVYFNKKGLLSYSSLSEKILKRAIKDMLDLEKNFMQVRRIKDYDKEARLNFIKKYNSEESSNLKMSDKFIDNIIASPQVKKSLRQSIKIINAIIKDQKCLPTSISVESTKELNSKNRKKEIEKEQRIQEKLKKEASNYLTSVLGESKCTPINITKMMLYNETNGHCIYCNKPLDINYILSDGVQVEHILPLSKSFNDSFNNKVISCKDCNQNKKDQTPYQWLGNSNRFEEFEKRVLDNNNLCDEKKDNLLFKDDINKYKIRFFNRNLRDTAYATTELINQIEIFNYYLEVKNKKRINTLSIPGQITSNIRRNNNLDKNRDDGKYHHAVDAAIVVSVSTTNIGQIMLKAQNDKEFWINNKNGYEDKNNYLKNVNIKDIIEQIKKINNNNTKISKQVEKNPQGQIANANIYKMIKKYDNQYIINQIDNIYTYDFTTDSNKKLFENLLDEENDNVTLLCYDKDRNTFEYIKKIYNEYKNEKGNPFINYLIDKGEINDVKKFNPNINGIKMVSKNNNGPIIKRLRYYSKKNDLYMLNKKSINKKDSTYLALDNLKQYCVKIYVDEKDKKFVFLPIYTISLNPKTKLINENDNYYKLFYDKYIKDKNVSFFADIYNGNKLEITKKDGTVITDYYSCFHKTHNMLVLNDGGSFTTNDKKISIIHTDILGNEKKRLTKEL

SEQ ID NO: 458 - protein, 1090 aa, synthetic construct
  REGION 1..1090: note = MG87-56 effector
MTKNYSIGIDMGVNNVGWSILNNDTKKLEDYGVRLFPTSNDAKERREVRNTRRRLKRKETRLDDTLYLLKKYGFNEDNTIEENLIEKRVKGLNEKLEKQDIVNILCYMIKHRGYIPFGDEEVTLVDLNGKYPCEFYYEMYKNGGKYRNRKMTVRITDNEKEIKKILETQSKYYKNINQDFINKYLNILTRKRKYWEGPGSINDLTPFGRFKTQEDVENYLEEKRKNPSYEKYIYEDLIKKCDYELEERCCCKLNIYYELFNMYQDFINVSFKNIEELENKDCFYETKNGLYKLNKKGLLMVKDYCMNNFKLKYTDILKKLFNTDKDNISGYRIDKDHKPEFSTLNSYRKIMLEFTEKGFDTTWVSDYNCYNEIMEKMTLTPGGVEFIKEIENNKLVPYKFNEEEKSLFKELKEYFNKKTLLSYGSLSQKILQKAINDMLDLEKNFMQVSRIKDYGKEARENFIKQYKKTSNKLEINASFVDDIIASPQVKKSLRQAIKIINAIIEKEECLPVSIAIESTKELNSDKKKKEIEKEQKIQENLRKQASNYLSVVFGDSNATETNILKVMLYNETNGHCAYCNKPLNINDIFTDNIQVDHILPISKSFNDSFNNKIISCKKCNDDKKNNTPYQFLKNKNYFEEFEKRVLENKNISDYKKDNLLYKDDLDKYKTRFFNRNLRDTAYATTELINQIEIFNNYLEILDKKRINTLSVPGQITSSIRNRYVKNEDKTSLEKNRDAGVFHHAVDASIVVSVSDTHIGQIMLKAQNDKEYWIKNKSGYDDIYKYLINLRIDDTINQIEKINNENIKISKQVSKNPQGKLANSNIYKMIKKDNEQYIINQIDNIYTFDFKKDENKKLFEKLLNEENNEFTLLCYDNDKNTFNYIKKIYNEYKNEKGNPFVNYLIDKGEISDGNSFDYDITGIRMVTKKGNGPIIKRLRYYSKKNDLYILNKKNINKKDSNYLALDSLKQFCVKVYVDNDNKKFVFLPIYTISLDPKTKKVNENDEFYKLFYNKYIGNKNVTFFSDIYNGNKLEITKKDGTIVSGYYSTFDKSSNRLETQNGHKFVCSDKKISIVHTDILGNEKKRLTKEL

SEQ ID NO: 459 - protein, 966 aa, synthetic construct
  REGION 1..966: note = MG87-57 effector
MMLKTVSQENYVIGLDMGVNNVGWSIVNLDEHKIEKCGVRLFNPSDNAQNRRVARSTRRRLRRAKLRVDEALRLFKSIGFSLNPTIDNELLSKRIKALYEKVERQDIINIVKYMMRHRGYIPFDDEEINFVELNGKYPCEYYGELLASHGKIRALNETVKTSELKDELKAILDKQSEYYPELSAIKDKILKIFSRKREFWEGPGSEKSFSPFGRFKEQSDVEEYKRKKEENSAYEKYLFEDLIGRCNIIYLDEPCAPIANFHAQKFNLINDFTNLTFSDIEDTFDSEFFVEVSYGHKLSSKGIEAIINRCITCSKQLKLDTLFKDVLNLKIDNAKGFRIDKSQKTEMSMMDAYRSILRIFKKADMEVPIWISEIELYNKLIYYINVVPSSKSLIEMLKGDKDFKNYIQDNDANILKEIYKCIKSKYSGYHSLSEKALKKANADMLFSNMNFQQVRKKFDYDRAYREKCAHDYSMSNGNLKLSNKFIDELIASPQVKKSLRQAVKIINSIIKEKGTLPYCISIESEKEINGKGRINEINKEQRIQENLRKSAEERIKENGYIPSEKLIMKVMLYEEINGYCPYCNSQKIDLSDVLKNRIQVEHILPLSKSGNNSYNNKTLSCESCNSKKNNRTPFEWLHSGGYDDFKKRIQENPKFSEEKKQNFLFEEDLDKYSTRFINRNLRDNAYATKELVNQIKLFNYFLKDKFNITIKTLATPGQITHKIRQNYDLKKDRDAGKFHHAVDANIVACIADTDIGKTIIETQNNEGYWFTLKQRNLDGKIKDEIAYHLEHVNLNLYKDYIKSIDDDSKVMLSSQVNKTAQGQISDANINKFIKIDGELYKVSQINNIYEEKTSDLAEYFNDESKKVHLMIRDNNVKLYNKLKDIFYKYMDQKGNPFKNYCFDKNRDDVTFSDIKDFNPRIHGIKASENPKSPTVIKLRYYSKVGSPYMLNNQKYHKRDNTLRSKT

SEQ ID NO: 460 - protein, 1090 aa, synthetic construct
  REGION 1..1090: note = MG87-58 effector
MTKNYSIGIDMGVNNVGWSILNNDTKKLENYGVRLFPTSNDAKERREVRNTRRRLKRKETRLDDTLYLLKKYGFNEDNTIEENLIEKRVKGLNEKLEKQDIVNILCYMIKHRGYIPFGDEEVTLVDLNGKYPCEFYYEMYKNGGKYRNRKMTVRITDNENEIKKILETQAKYYKNINQDFINKYLNILTRKRKYWEGPGSINDLTPFGRFKTQEDVENYLEEKRKNPSYEKYIYEDLIKKCDYELEERCCCKLNIYYELFNMYQDFINVSFKNIEELENKDCFYETKNGLYKLNKKGLLMVKDYCMNNFKLKYTDILKKLFNTDKDNISGYRIDKDHKPEFSTLNSYRKIMLEFTEKGFDTTWVSDYNCYNEIMEKMTLTPGGVEFIKEIENNKLVPYKFNEEEKSLFKELKEYFNKKTLLSYGSLSQKILQKAINDMLDLEKNFMQVSRIKDYGKEARENFIKQYKKTSNKLEINASFVDDIIASPQVKKSLRQAIKIINAIIEKEECLPVSIAIESTKELNSDKKKKEIEKEQKIQENLRKQASNYLSVVFGDSNVTETNILKLMLYNETNGHCAYCNKPLNINDIFTDNIQVDHILPISKSFNDSFNNKIISCKKCNDDKKNNTPYQFLKNKNYFEEFEKRVLENKNISDYKKDNLLYKDDLDKYKTRFFNRNLRDTAYATTELINQIEIFNNYLEILDKKRINTLSVPGQITSSIRNRYVKNEDKTSLEKNRDAGVFHHAVDASIVVSVSDTHIGQIMLKAQNDKEYWIKNKSGYDDIYKYLINLRIDDTINQIEKINNENIKISKQVSKNPQGKLANSNIYKMIKKDNGQYIINQIDNIYTFDFKKDENKKLFEKLLNEENNEFTLLCYDNDKNTFNYIKKIYNEYKNEKGNPFVNYLIDKGEISDGNSLDYDITGIRMVTKKGNGPIIKRLRYYSKKNDLYILNKKNINKKDSNYLALDSLKQFCVKVYVDNDNKKFVFLPIYTISLDPKTKKVNENNEFYKLFYNKYIGNKNVTFFADIYNGNKLEITKKDGTIVSGYYSTFNKSANRLETQNGYIFVCSDKKISIVHTDILGNEKKRLTKEL

SEQ ID NO: 461 - protein, 1123 aa, synthetic construct
  REGION 1..1123: note = MG87-59 effector
MKKYTIGLDLGINNVGWAKYDLETKKVIDKGVVRFKESSTAQDRRIIRGSRRLRKRKQHRVERLAIQLSNINFCTSRSYEPELLNKRIKGLNESLSEQEITNIIYWFAIHRGYIPFDEEKPEREVHKFAEDGYPCQYIFDYYKEYGVYRGQCDLISLKDNLKELKQILLTQQKYHSKLTDEVIDNILYIIQSKREFWEGPGASKENQLSPYGRYRTLEDLEKYKADSTYHQYLYEMLIGKCELSIDKDGFMDQVAPKCNFYAEEFNFYNDFINMSVKEPSQIDEEYRNKITLKGKFTEDTIEEIKKEIISTKKVSLDKLVKKILGLELKDIQGYRIDKKYKPEISQFEFYKYLLKSFKDEKLNPSWLENDDKTIYNQIVYILTVAPSTYAIEDMLKDRVKEVEFKKEEIDVLIDIKKKKNPDLKYHSLSERILKKALDDIKRHNCEYNFMQIMKRLEYEKEMKEYFQNNYSTKTQSPYTIEDQYIDHLIANPQVKKTLRKAIKIINAIIKEEKNYPETIVIESATSLNSKERKKQIEEEQKTFNQLNKEVKKELEDNGYEVTDKNMQLLINWKETNESCIYCGESISLKEVLITEIEHILPKSKSMDNSHNNTTCSCLKCNKEKNNRTPYQYLTSKNMYEGFKNRVMNQYDKMSQDKKSNLLFEGDIDKYSIKFINRNLRDTSYASVALVQELKKYNEYLGAKEGYKINIITSPGQLTSKIRQYLKIKDKDRTYLYHHVVDAMILASIPDTEIGKVLIEAQNDSQYWFKDKNKENKYKEEVYNMLNNVWLSNRDQIQKFNQDCDNMPDNNKEGLIKRSYEVLKNPVRQFSQYTEYAKYIKQNDVYYKISQIDNIYNLLIRKKDGSADKDKKLLDELFDLSNKKNKTLLCEKKDPKLYQKLKNIYEKNSFSINPFVDESKYMYGLEDGDKFDCLKQGIRKTDNSNSPLVIKLRYLEKVTNPYIKNNITTRRKNLYNEFTINKPKKDTLIGLDGLKQVSTRIFYSYEDKKFIFLPICAISFVNGKLNKKEKNYQTTYNRLIGNKNVKEMGNIYVGEWVGVYKKNGEYFEGRYKGYHKTSNVLEYYINGLDTLSCATIGSSDLRIIIYTTDILGNRHIRLDTQKEI

SEQ ID NO: 462 - protein, 1123 aa, synthetic construct
  REGION 1..1123: note = MG87-60 effector
MKKYTIGLDLGINNVGWAKYDLETKKVIDKGVVRFKESSTAQDRRIIRGSRRLRKRKQHRVERLAIQLSNINFCTSRSYEPELLNKRIKGLNESLSEQEITNIIYWFAIHRGYIPFDEEKPEREVHKFAEDEYPCQYIFDYYKEYGVYRGQCDLISLKDNLKELKQILLTQQKYHSKLTDEVIDNILYIIQSKREFWEGPGASKENQLSPYGRYRTLEDLEKYKADPTYHQYLYEMLIGKCELSIDKDGFMDQVAPKCNFYAEEFNFYNDFINMSVKEPSQIDEEYRNKITLKGKFTEDTIEEIKKEIISTKKVSLDKLVKKILGLELKDIQGYRIDKKYKPEISQFEFYKYLLKSFKDEKLNPSWLENDDKTIYNQIVYILTVAPSTYAIEDMLKDRVKEVEFKKEEIDVLIDIKKKKNPDLKYHSLSERILKKALDDIKRHNCEYNFMQIMKRLEYEKEMKEYFQNNYSTKTQSPYTIEDQYIDHLIANPQVKKTLRKAIKVINAIIKKEKNYPETIVIESATSLNSKERKKQIKAEQKKYDKLNEEAKNELEANGYEATDKNMQLLINWKETNESCIYCGESISLKEVLTTEIEHILPKSKSMDNSHNNTTCSCLKCNKEKNNRTPYQYLTSENRYEGFKNRVMNQYDKMSQDKKSNLLFEGDIDKYSIKFINRNLRDTSYASVALVQELKKYNEYLGAKEGYKINIITSPGQLTSKIRQYLKIKDKDRTYLYHHVVDAMILASIPDTEIGKVLIEAQNDSQYWFKDKNKENKYKEEVYNMLNHVWLSNRDQIQKFNQDCDNMPEDNKDGLIKRSYEVLKNPIQQFSQYTEYAKYIKQDDGYYKILQVDNIYNLLIRKKDGSVDKDKQLLDELFDLSNKKTISLLCEKKDPKLYQKLKDIYIKNASSINPFVDECKYMYGLEEGDKFNYLKQGIRKTDNPNSPLVIRLRYLKRVTNPYIKNNITTRRKNVYNEFTINKPKKDTIIGLDGLKQVSTRIFYSYDDKKFIFLPICAISFVNGKLNKKEKNYQTTYNRLIGNKNVKEIGNIYTGEWVGVYKKNGEYFEGRYKGYHKTSNVLEYYINGLDTLSCAKICSSDLRIIIYTTDILGNRHIRLDTQKEI

SEQ ID NO: 463 - protein, 1093 aa, synthetic construct
  REGION 1..1093: note = MG88-1 active effector
MKYKIGLDLGSTSLGWAVVELNEADQITSLVDMGVRIFPDGRDAKSHKPINVIRREHRQMRRRGDRVLLRKKRVLQLIHKYGLDFDISADIKLEDPYVLRARAVSDKLSSAELGRVLFHLALRRGFKSNRKETRGDSGGKLKKATLALHDAIGDKTLGEFQVDSKRYRFADQFDGNKIKDGALYPTRDMYLDEFNRICSVQNMSDDMRQQFEYAIFHQRPLVPPEIGTCMFELDQPRAYKFEPVFQRFRVLQQINQLRIINNGEIKELTAEQREKLQDALLATFCGVKRDKSGRPKITFAEVKKLLGLSRNTKFNLESEKRKDMDVDATAFAFAECELADFWRACTDNVKSQVLAHLNDDELSDSDLVDYLAHEYGISQDKAEKLIQQPFEDGVANLSVCAMQKMLPFLEQGHLYHIAAKEAGYDHADRGIVHLDTLPYYGDVMALRPSLVQDKMGRYRTMNATVHIALNQLRAVVNDLIARFDGEPYAINIEMGRDVSAGADERAEIEKQQAANKRENDRIATELVAMGVRVCRENIQKYKLWENLGKSPLDRRCVYTGEIISKEKLFSPEFEIEHILPFSRTLDDSMANKTISAAVANRFKGNRSPDEAFSDPKSPWKYEDVVARAQNLPDATKWRFNRGAMDVFLQGKECIARAMNDTRFMTRMAVTYLQHVCADKNRVNGMPGRLTASLRDEWHLNWWKNKAEESKYRGNHIHHAIDAFVIACTDENILRKLADAKSDMHTPFPGFDYFDFKMRCENTIISYRQSQKNPKDAHSTVGCLHEDTAYNLECFEDGGCGVNAVMSHREELPTTDKDKKAFAKDFKNVNPKTLQMFLNDAGVANEEPDIAIKFLDWCAMRNIRKVRMYKTGVDVTTYVPVFRTKKQRDVYRAAYLNWYVNTGVASGIVDKKLRAVQQEKEKHLLQEFQDAAKQAYKWYVGGNNFCAEIFEIRDDDTRYPKLRGRWQVEILSNYNAQLNAGAPLWRHKYATAKRIMSLRINDMVMAEFSKDDPKLPKGLVETVAHQCAIEKTDKVNVVFRVKKLNSSGTVYLRPHFIAKEDADTKSWIASATSLQEHKARKVCVSPSGKILGLK

SEQ ID NO: 464 - protein, 1146 aa, synthetic construct
  REGION 1..1146: note = MG88-2 active effector
MNYRLGLDMGATSIGWSIYDVETEKLLDTGVRIFDDGREDKSKASLCVKRRNARGARKLNNRRHIKTQELLKILTTLGLFPQEQNKREDLKNDNPYKLRKEALDRQLSTYELGRTLMQLAKRKGFKSNRKDNREEGGKLKKGFAELKDIMQKENARTYGEFLYNCMQRNPDKPIRLKNTFDESGKYKGGLFPFREIYVNEFEQIWHKQKEYYPQILTDENKEKLKNIIFFQRPLKEAEEGECQFEKGEKRIPRAHPLFQEFRIWQNVLNLTFSAENEPDYKPLEKVQELIKLLMNPQEVKPNKQGIIIYANLKKALGLDKNGVFNFERQNNRDTDLEKGLLVNTTQNAINESEFLAPYWNNFSDAQKGELINVIMRPHNYIPFPKTRISIEEEDDLIINYVRKRFNLPQEAAEELLFDIDLEDDFGSLSEKAISKILPFMKQGTPYHDACQSAGYHHSYKEYEHIDKLPYYGEILGQSCLGKKNNPKCVEEEFGKINNATVHVALNQIRHLINEIIMRYGKPYDIAVEYARDLNASTQERLAMTDTRDKNELENQRIIKELQSKLGNHPYSKNDIQKYKIWKKLPFYDKNPLIRECPFSGEQIPLSELLNGQKFQIEHLIPFSRSLDDSLNNKVIATVEANRYKGNRTPFEAFGQSKDGYNWKDIQHRAKKLSVEQQWRFAPDAMQRFEKQEGPIVRSLIDTRYMTRLLQDYLQPIVKEDGKQRVQAVVGQLTSLVRKAWGLNVYKEKADKDKYREFHNHHAIDAIVISAINRAQIKDVVGILAHVRDDIREEYKDELFQLSDNNVPEDKKREIKKEIRDVTAKREIAIAKKYFPLPKSFNIPDILQQVAAINISHKPNLKNIKQKDSTIGQLHQDTAYGLQKFVDDKSLKAIFKTKKAGDEASDDKTTPKDITQYIPMFRNKEDKKAYYDAFREWFKFNGKAASMDAKTKEDKKLKAEIAQKEQAAIQTLRQTALKAFKWFVGGNNFCAEIYEINPNNKIEGVASKDRGEWKTEIVSNYNATVRNSRGEDIAYWRYKYPNAKRIMSLRGNDMVMATFSREQAFDEKFPKGIQEYVREKFQQKSDCQELDILFRVKKMGSNGICFTPHNIAKENADTKSWIASAGAMQKYRVRKIHISYMGRIQNA

SEQ ID NO: 465 - protein, 1252 aa, synthetic construct
  REGION 1..1252: note = MG88-3 active effector
MKYKFAFDLGSTSCGWAVVNTDEDGNVVGLADMGVRIFPDGRNAKTKEPLQVARRNARGARVRNDRILQRRHKIIDLLKENGMIYDCSDERENPYKLRSDAVDKEITLKQLGRIMYNLSLRRGFKSNRKPTQKENDSDLKKATEKLKQELKGQTLGQYLWGKMKKNLDKEKENKGKDVKNKIGKVRFSNLFDGNKIKDGSVYPSREMYEDEFNRIWSKQAEFHDILTDELKGKFYNAIFFQRPLKPQQRGFCMFEDGELRIYKAHPLFQRFRALQTINQMEIDDKPLTEEQREALKKELFEEFKTKNTKAGTVSFSDIRTILGLKKGVKINLEKNDDDENDGDNTRADKTPEDKDNKKDDDKEYDNIYADKTAYLLSRPECFGEKWFEIPFDEQCSIVDILTDCVYNNIEEKKKYDEQQEQNGKHILEDDEIKQFLQEHYNLDDEQCNAIMNAPLEEGTGSLSQKAIEKILPYLEEGQLYNDACKSAGYHHSLFDGDVEMLGELPYYGDVLKKSCVQDKDGNYRITNISVHVALNQLRLVVNELIKKYGNPDFVAVEIARDLKMGTEELKNLNNKQNSNKKENDKITKAIKEANGNPNNAKDREKFKLWELCQKRCVYTGKQISATELFSDRVHVDHILPFSRTFNNGFFNKVVCFGDANEDKGNSTPYEAFKNGYQGQSYEEILDRVKKIVEAMKEKKMFKKKTVKDKDGKKKKVDIDEFSWRFKEDAMEKFKEQEGLIARQLNDTKYMSRLAVQYLKHICKVEYYTDEEGKEHRKNNCYGLPGTMTDFCRKGWGVNWLKDKSNKEGYRSSHAHHAVDAFVVACMTRGQLQKIASMANWIEEHGGQCQDDKLYLSILFKKCKKPFDTFDRERIYELCDKMPISFKPKLKDPKQENSTVGALCEDTAYSLLEFDKGLNGVFVKREDVGSLVLKDLPNIIDTQADKLIKEYVETEEAFNKFKEYCEKNGIKKIRCKSFADVSTYIPIFKTKEERDEYHKAYEDWFIFEGRSPANETEEQKQERKEKEQELLKIVQQKALKAYKWFVGGNNFCADVYQISPRDKVYTDKKEQGSWKVEVLSNYMATLNKGQALWRKKHPTARLVMRLKIDDMVMGENFTKEEAEQKLQQEIEKWEKSKEMKKYKDKLTEWEKTHEGKEPKKPEKPKSINEIIIEKCNKEKTSSTSFLFRVKKISSDGSVYIRPDFITKEESDKKSVKLSASSYQKYKIRKVFVSPAGKLVDNGFSDKWNDTKCN

SEQ ID NO: 466 - protein, 1093 aa, synthetic construct
  REGION 1..1093: note = MG88-4 effector
MKYKIGLDLGSTSLGWAVVELNEADQITSLVDMGVRIFPDGRDAKSHKPINVIRREHRQMRRRGDRVLLRKKRVLQLIHKYGLDFDISADIKLEDPYVLRARAVSDKLSSAELGRVLFHLALRRGFKSNRKETRGDSGGKLKKATLALHDAIGDKTLGEFQVDSKRYRFADQFDGNKIKDGALYPTRDMYLDEFNRICSVQNMSDDMRQQFEYAIFHQRPLVPPEIGTCMFELDQPRAYKFEPVFQRFRVLQQINQLRIINNGEIKELTAEQREKLQDALLATFCGVKRDKSGRPKITFAEVKKLLGLSRNTKFNLESEKRKDMDVDATAFAFAECELADFWRACTDNVKSQVLAHLNDDELSDSDLVDYLAHEYGISQDKAEKLIQQPFEDGVANLSVCAMQKMLPFLEQGHLYHIAAKEAGYDHADRGIVHLDTLPYYGDVMALRPSLVQDKMGRYRTMNATVHIALNQLRAVVNDLIARFDGEPYAINIEMGRDVSAGADERAEIEKQQAANKRENDRIATELIAMGVRVCRENIQKYKLWENLGKSPLDRRCVYTGEIISKEKLFSPEFEIEHILPFSRTLDDSMANKTISAAVANRFKGNRSPDEAFSDPKSPWKYEDVVARAQNLPEATKWRFNRGAMDAFLQGKECIARAMNDTRFMTRMAVTYLQHVCADKNRVTGMPGRLTASLRDEWHLNWWKNKAEESKYRGNHIHHAIDAFVIACTDENILRKLADAKSDMHTPFPGFDYFDFKMRCENTIISYRQSQKNPKDIHSTVGCLHEDTAYNLECFEDGGCGVNAVMSHREELPTTDKDKKAFAKDFKNVNPKTLQMFLNDAGVANEEPDIAIKFLDWCAMRNIRKVRMYKTGVDVTTYVPVFRTKKQRDVYRAAYLNWYVNTGVASGIVDKKLRAVQQEKEKHLLQEFQDAAKQAYKWYVGGNNFCAEIFEIRDDDTRYPKLRGRWQVEILSNYNAQLNAGAPLWRHKYATAKRIMSLRINDMVMAEFSKDDPKLPKGLVETVAHQCAIEKTDKVNVVFRVKKLNSSGTVYLRPHFIAKEDADTKSWIASATSLQEHKARKVCVSPSGKILGLK

SEQ ID NO: 467 - protein, 1140 aa, synthetic construct
  REGION 1..1140: note = MG88-5 effector
MKYRIGLDMGATSIGWSVFDVENQNVVDFGVRIFDDGREDKSKASLCVKRRNARGARRLVKRRHIKMTELLKILTSLNLFPINKEERNSLKKKNPYLLRKEALDRQLSPFELGRVFLQLAKRKGFKSNRKDNKEEGGKLNNGYQELLSIMTEKGARTYGEYLYMRLKEHRSIRLKNCFDDSGKYQGSEFPFREIYEKEFDIIWNKQKEYYKDILSDENYKKIKNVIYFQRPLKIAEEGECLFEKGEKRIPRAHPLFQEFRIWQTVMNLKFCKENEQDYENLKKEEIEKLVSLLRNPLSLKPNAKGIVIYSNIKKALGWSAKGLFNFERSERANADLEKGLLVDTTQLAMDKSSYMADFWNKMTEDKKEKLINVLFRPQRYINYPTGRLSIDDENNLILNYLISEFSLSAEAANELLYKIDLEDDFGSLSEKAIRKLLFLMKNGQQYVDAWRELYPQADKQHLDYLPYYGEILTQSCTGKKSSPQTNEEAYGRINNATVHVALNQVRHLVNEIIKKYGKPFDIAVEYARDLPASTEERKKMRDTQDANEQENQKILKEMKEKIGDNSYNKRDIVKYKIWKRMSTLSKSPLTKECPFTGKPIGIEDLMNGQKVQIEHLIPFSRSLDDSLDNKVLAYVEANRYKDNRTPYEAFGESKDGYNWKEIQQRAKRLSVEQQWRFSPDAMEKFEKKAGPIARSLNDTRYMTRLLHDYLQPIVHEDGKQTVQAVVGALTSLVRKAWGLNIYKDKTDEEIYRSFHNHHAIDALIVSAIERSQIAEVGRVLQQVSKSVLEEFKDKFAILRDENATSEEKRKLRKEIKNFEQERTIALVKEHFPMPKSLRVEDILGRVSNINVSHKPNLKNIKDSSSTIGQLHEDSAYGLQRFVSDKGLKAVFKYQKKDEEKIVEKDVSEYIPIFYEKADKDAYYDAYKNWFILDKKSSTMKAQGKDQKQAKEKIAKEETDAISKLREASKKAFKWFVGGGNFCAEVYQINPQNKIEGVSTNNQGEWRTEIVSNYNATIRQKRGEDIGYWRYKYPNAKRIMSLRRNDMVLATFSKEQAFSDDFPKGISSYVREKFEHNPSLEYIDILFRVKKMSESSIFFTPHDIAKEDADPKSWKASAEKMKLYNTRKVFVTPMGRICHAK

SEQ ID NO: 468 - protein, 1089 aa, synthetic construct
  REGION 1..1089: note = MG88-6 effector
MKYRLGIDLGSTSLGWCVLELDENNDIKRAVNAGVRIFSDGRNEKDHTPLAVIRREARGIRINRDRYKKRRARLLSLFIENGLMPKDEKERKKLQLLNPYELRAKGIKNKISLYELGRALFHINQRRGFKSNRKSDGRQKDEKGKIKDAADRLKKELKERGYETIGEFFYSRLQKGETTRVRLTEKGYEIYPLREMYEHEVETLLNFQKKYHKELNDKLIKEIQYTIFFQRDLKPQEPGFCEFEEGKKRLAKAHPLFQEFRIEQEVNNLETDGKTGEYLSFEQRQKIKDILNSCKIKPNKSNMEISFASIKKAIGLPKNAKFNYESEKRKGLKCNTTNYYLSDEDAFGADWFNMAEEERFKVAEMITSSAKDYEVIEWLKKNYKLAEEKAANITDAFLEEGYGSLSKEAIIKILPYLKEGLLYPDACEKAGYHHSDRRPKKILEQLPYYGEVMPNKVIGGTKNPADKNNPEKYFGKINNPSVHIALNQLRKVVNALIKKYGHPEQIAFELARELKSGTKGLKELEKEQVKNQKENEKIDKILKENGLPCNSENRLRYKLWEELGEKPVDRRCVFTGKQISFKDIWSDKFEIEHLLPFSRTYDDSRSNKTLSSREANRIKGNRTPYEAFGESKEWEEIMKRVQKLPENKRWRFSKDAMQKYEKDGGPIARLLNDTRYMSRVGKEYLSHICDADQVYAIPGQLTGLLRGVWGLNSMKEKSDSEIYRADHRHHAIDAFVVGCTTRGMLKTASECADWAEKAGGEYEGRRKLLKKKFLPFASFEGKGREEFEKIVENIVVSYKPDHKGAEKAVKIHSTTGALHQETAYGPAKVKAKKKGCIAVTNRIDIKSVEEKDLENIADKNIAKALAKILKIEDKEKKAQALEKFSKENKIKKVKCILEKDEDVMIPIYKTNKNGKKEEKPYKYYQGGNNYCMDIYCLRPDDKKYPKDAGKWKGEVISNFSVHQPDFQPQWRKIHPTAKRVMRLFINDTVCLTFNRNEPEDEIPMGLKSFVSDAFAKNTGKEINMLFRVKKMSGSRVYLRPSFVSKEEGDKLSWGPSAQGLFERKARKVYVNEIGEYKDPGFVDVWEKKK

SEQ ID NO: 469 - protein, 1095 aa, synthetic construct
  REGION 1..1095: note = MG88-7 effector
MKYRLGLDLGSTSLGWCVLELDSNGDIKNIKDAGVRIFPDGRDDKTKVPLSVNRREARGQRRNRDRYLKRRQRLIESLVKFGLMPSDIEKRKELIKLNPYELRAKAIKEKLSLYELGRALFHINQRRGFKSNRKYDITDKDEKGKILTASQKLKDKIAEYGCKTIGEFLWKRYKNGETVRVKMKDGQYDFYPLREMYEKEVDIIFKKQIEFYPEILEKAEKEIKEIIFFQRDLLPQEKGYCEFEKNEKRIAKAHPLFQEFRIEQDVNNLDTDGRMGEYLSEEQKNKIKQILNNCEIAPNKNNFEISFSKIKTQIGLNKNVKFNFESDKRKGLKCNTTNFLLSSEDCFGEEWYKLNDEKRAEVVEWLISDKKDFEIKNYLKKEFNFDDSKSEKVMGTILEDGYASLSKKAIEKILPYLKQGKIYSEACKNAGYHHSDHKPDKILPNLPYYGEVLSNKVMRDNKNCNDTDSPEKKYGKINNPSVHIALNQLRKVINALIKKYGHPDEISIEMARDLKLGTKALEEIKKEQEKNQKDNERIDEILKRNKLPVNPENRLRYKLWEELSDKPQYRQCVYTGKQISVKDIWTDKFEIDHILPFSRTYDDARSNKILISREANRVKGNMTPFEAFGKTDKWPEILKRIERLPDNKKWRFGENAMKRYEQEGGIIARLLNDTRYMARVAKEYLSFICAPNKIDVPPGQLTAILRNVWGLNFLKDKNKTKSYRMDHRHHAIDAFIIGCTTKSMLQKAAQCSEKAEEMGGHFKGRIKLFKGKFLPFEGFNKNIRESFKKMIDNIIVSYKPDHKDVQKAISNYSTIGPLHEATAYGPTNLKSKKPGYIIVSIRRDLKDINEKDLDNIADKGIAKELKEILKIKDIDKRKKLLEKYSKDNNIKKVTCYEEKDENVLIPIYKKKSDGTYYEKPYKYYIGGNNYCIDIICLRPDDKREPEKAGKWKGEVISNYNAHKPNFEPKWRKEHPTAKRIMRLFINDMIVLTFNKKDKNDFPKNIKNFILEEFNKTKKNEVDMVFRIKKISTNGTFFITPHFIVKDEKDKFSWGASVSGIFIYKARKVYVDELGKIIDNGFIQGWEKNVKCVRNK

SEQ ID NO: 470 - protein, 1109 aa, synthetic construct
  REGION 1..1109: note = MG88-8 effector
MKYKLGLDLGSTSLGWAVVELNDVDNITRLVDMGVRIFPDGRDAQSHTPINVVRREHRQMRRRGDRVALRKKRTLQLIHKYGMDFDIRVDATLADPYALRARAVVEKLQPHELGRVLFHLALRRGFKSNRKETRGEAGGKLKNATASLQVAMGDKTLGQFQFESHRYRFAEQFDGNKIKDGAFYPTRDMYLAEFNRICTAQGLSDEMRKEFEHAIFHQRPLLPPVIGTCMFEPGQLRAYKFEPVFQRFRVLQQINQLRIIDNGVVTELSGEQRQKLQDILLRTFDDVKRDKSGRVKITFAAVRKMLGLARGVRFNLETEKRKEMDVDTTAFAFSECGLSDFWYACPDDKKSQILARINDDTLNDDDLIGYLVDKCGLNSDVAAQLIQRPFEEGVANLSVCAMQKMLPFLAQGDLYHVAEDKAGYNHADRGVVQMAQLPYYGDVAALKPSLVPDKNGVYRTMNATVHIALNQLRAVVNDLIARFGSVPYAINIEMGRDVRAGARERAEIDSQQAANKRENDRIASELVVMGGRVSRENIQKYKLWENLGKNPLDRRCVYTGEIISKEKLFSPEFEIEHILPFSRTLDDSMANKTISAVAANRFKGNRSPDEAFTDSKSPWHYDDVVARAQNLPGATKWRFNRGAMNAFLRDQDCIARALNDTRFMTRIAVTYLQHVCADKYRVTGMPGRMTAMLRDAWHLDWWKDKADAEKYRGNHIHHAIDAFVVACTGAGILQRLSRNAIETDKLFGKTQKEKRRQWFVDMNVPFDGFDYYDFKMRCENTIISYRQSQKSPKDSKGTIGCLHEDTAYNLEFFERGTSAVMSRRDALPTTDKDKKDFAKAFNNVNPKTLQMFLKDTGTTNDEPNIANKFLDWCTLRDIRKVRMYKRGVDVTTYVPVFRTKRQRDTYRATYLNWYVASGIAGGIADKKMRLAQQEKEKALLQEFQNAAKLAYKWYVGGNNFCADVFKMRDDDKRYPKLRGRWQVEILSNYNAQLDAGSPLWRRKYATAGRVMRLRINDMVMATFSKDDPKLPKGLVETVMHQCAIENTDTVNVIFRVKKISSNGTIYLRPHFIAKEEGDTKSWIASATSLQEHNAHKVYVSPSGKLQCLE

SEQ ID NO: 471 - protein, 1109 aa, synthetic construct
  REGION 1..1109: note = MG88-9 effector
MKYKLGLDLGSTSLGWAVVELNDMDNITRLVDMGVRIFPDGRDAQSHTPINVVRREHRQMRRRGDRVALRKKRTLQLIHKYGMDFDIHSNVSLENPYALRARAVVEKLQPHELGRVLFHLALRRGFKSNRKETRGEAGGKLKNATASLQVAMGDKTLGQFQFESHRYRFAEQFDGNKIKDGAFYPTRDMYLAEFNRICTAQGLSDEMRKEFEHAIFHQRPLLPPVIGTCMFEPGQLRAYKFEPVFQRFRVLQQINQLRIIDNGVVTELSGEQRQKLQDILLRTFDGVKRDKSGRVKITFAAVRKMLGLARGVRFNLETEKRKEMDVDTTAFAFSECGLSDFWYACPDDKKSQILARINDDTLGDDDLVDYLVENCGLNPDVAAQLIQRPFEDGVANLSVCAMQKMLPFLAQGDLYHVAADKAGYNHADRGVVQMAQLPYYGDVAALKPSLAPDKNGVYRTMNATVHIALNQLRAVVNDLIARFGSVPYAINIEMGRDVRAGALERAEIDSQQAANKRENDRIASELVVMGVRVSRENIQKYKLWENLGKNPLDRRCVYTGEIISKEKLFSPEFEIEHILPFSRTLDDSMANKTISAVAANRFKGNRSPDEAFTDSKSPWHYDDVVARAQNLPGATKWRFNRGAMNAFLRDQDCIARALNDTRFMTRISVTYLQHVCADKYRVTGMPGRMTAMLRDAWHLDWWKDKADAEKYRGNHIHHAIDAFVVACTGAGILQRLSRNAIETDKLFGKPQKEKRRQWFVDMNVPFDGFDYYDFKMRCENTIISYRQSQKSPKDSKGTIGCLHEDTAYNLEFFERGTSAVMSRRDALPTTDKDRKAFTKDFNNVNPKTLQMFLKDTGTTNDEPNIANKFLDWCTLRDIRKVRMYKRGVDVTTYVPVFRTKRQRDTYRAAYLNWYVASGIAGGIADKKMRLAQQEKEKALLQEFQNAAKLAYKWYVGGNNFCADVFKMRDDDKRYPKLRGRWQVEILSNYNAQLDAGSPLWRRKYATAGRVMRLRINDMVMATFSKADPKLPKGLVETVMHQCAIENTDTVNVIFRVKKISSNGTIYLRPHFIAKEEGDTKSWAASATSLQEHNAHKVYVSPSGKLQCSE

SEQ ID NO: 472 - protein, 1109 aa, synthetic construct
  REGION 1..1109: note = MG88-10 effector
MKYKLGLDLGSTSLGWAVVELNDVDNITRLVDMGVRIFPDGRDAQSHTPINVVRREHRQMRRRGDRVALRKKRTLQLIHKYGMDFDIRSNVSLENPYALRARAVVEKLQPQELGRVLFHLAVRRGFKSNRKETRGEAGGKLKNATASLQVAMGDKTLGQFQFESHRYRFAEQFDGNKIKDGAFYPTRDMYLAEFNRICTAQGLSDEMRKEFEHAIFHQRPLLPPVIGTCMFEPGQLRAYKFEPVFQRFRVLQQINQLRIIDNGVVTELSGEQRQKLQDILLRTFDGVKRDKSGRVKITFAAVRKMLGLARGVRFNLETEKRKEMDVDTTAFAFSECGLSDFWYACPHDKKSQILARINDDTLGDDDLVDYLVENCGLNPDVAAQLIQRPFEDGVANLSVCAMQKMLPFLAQGDLYHVAEDKAGYNHADRGVVQMAQLPYYGDVAALKPSLVPDKNGVYRTMNATVHIALNQLRAVVNDLIARFGGVPYAINIEMGRDVRAGARERAEIDSQQAANKRENDRIASELVVMGVRVSRENIQKYKLWENLGKNPLDRRCVYTGEIISKEKLFSPEFEIEHILPFSRTLDDSMANKTISAVAANRFKGNRSPDEAFTDSKSPWHYDDVVARAQNLPGATKWRFNRGAMNAFLRDQDCIARALNDTRFMTRIAVTYLQHVCADKYRVTGMPGRMTAMLRDAWHLDWWKDKADAEKYRGNHIHHAIDAFVVACTGAGILQRLSRNAIETDKLFGKTQKEKRRQWFVDMNVPFDGFDYYDFKMRCENTIISYRQSQKSPKDSKGTIGCLHEDTAYNLEFFERGTTAVMSRRDALPTTDKDKKDFAKAFNNVNPKTLQMFLKDTGTTNDEPNIANKFLDWCTLRDIRKVRMYKRGVDVTTYVPVFRTKRQRDTYRAAYLNWYVASRIAGGIADKKMRLAQQEKEKALLQEFQNAAKLAYKWYVGGNNFCADVFKMRDDDKRYPKLRGRWQVEILSNYNAQLDAGSPLWRRKYATAGRVMRLRINDMVMATFSKDDPKLPKGLVETVMHQCAIENTDTVNVIFRVKKISSNGTIYLRPHFIAKEEGDTKSWAASAASLQEHNARKVYVSPSGKLQYSE

SEQ ID NO: 473 - protein, 1127 aa, synthetic construct
  REGION 1..1127: note = MG88-11 effector
MILSTQKYIIDTKGCNMKYKLGLDLGSTSLGWAIVELNEKDTPIRLVDMGVRIFPDGRDAQSHTPINAVRRQARQMRRRVDRIHIRKKRVLQLIHKYGMDFDIRTDKNLENPYELRVRALTQKLFSSELGRVLFHLSLRRGFKSTRKETRGEDGGKLKRATTALRTAMGDETLAQFQMQTGKYRFANQFDGTTIKDGALYPTRDMYLGEFREICKAQNLPDNIRQEFERAIFRQSPLKPVDVGKCVFEPEEPRAYKFEPDFQKWRALQQLNQLAILDKGIAIPLTGEQRSKLFNVMFNTFDGVSFEKNGRAKITFAKIKQILGLSRTSKFNLESEKRKDLDSDATGGAFYKIGEIEFWNARNDAEKSDILNRINDDKTDDSDLINYLVQEYGISAERAEQIIDIPLEEGVSNVSLKAIRKMLPFLEQGDLYHIAAHKAGYKHSEKDIPELDSLPYYGDLTALRPSLVPDKNGVYRTMNATVHIAMNQIRAVVNDLIHQYGKPYAINIEMGRDTRAGAQERSEIDAQQAKNKRENDRIRKELASIDITNPSREDFQKFKLWEALAKKPQDRMCVYTGRPITSLTELFKSGNFEIEHILPFSLTLDDSLANKTISAIDANKFKGNRIPYDAFNDPASPWSYDDVLRRAQNLPDSTKWRFNENAMERYLKDNPDCIARALNDTRHMTKMAVTYLQHICNNKSKVVGVNGQMTAMFRDMWHLNWWKDRADADKYRGSHIHHAIDAFVITCISPNMYYHIARNAGTAEHYFGKSQKEKRDIWFADMATPFDGFDYYDFKMKCENTIISYRKSIKDPRENGTVGCLHEETAYNLESFENDKTIKATMSRRVELPKTDEKREKFKKDFKNINKTTLQMFLSDTGVTNDDANIVPKFLDWCTARGIKKLRMLKSDVDISTYIPVFRTKKERNEYLRAYENWYVADGISAGIKNKHAKQEQLNKERELLDNFKSAAKRAYKWYVGGNNFCADIFEIRSDDKHYPKDAGKWKVDIVSNYMAETNPGVSLWHKKYPTARRIMSLRINDMVMAEFSKDDPQLPNGIRDTVAHQCAVENKDTVNMVFRVKKLNSSGTIYLRPHFIAKEDADTKSWIASTTSLKEHKARKISVSPTGKILK

SEQ ID NO: 474 - protein, 1136 aa, synthetic construct
  REGION 1..1136: note = MG88-12 effector
MKYRIGLDMGATSIGWAIFDIENQNLIDFGVRIFDDGREDKSKASLCVKRRNVRGARRLNNRRHIKTNELLKTLTALNLFPTEKPEKENLKKQNPYVLRKAALDRQLTPFELGRVLLQLSKRKGFKSNRKDNKEEGGKLKIGYQELLAAMTEKKARTYGEYLSMQLEEHKSVRLKNLFDDNGKYKGGLFPFREVYEQEFDKIWQKQKTFYSEILNDENYQKIKEIIFFQRPLKEVEEGECQFEKGEKRIPRAHPLFQEFRIWQNMLNLSFCSECDESYRPLNKQEYEKLAKLLQNPLPLKPNAKGVVIYANIKKALGLDKNGIFNFERGERAGSELEKGLLVDATQLSMDKSEYMVGFWQKMSIEQRGKLINVLARPKNYINYPSGKFSIDDENNLIISYLCQEFGLSDEAAKELLYDVSLEDGFGSLSEKAISKILYLMKNGITYTDAWRELYPSEDKQYLDFLPYYGELLTQNCVGKKSHPQTVEEEYGRISNATVHVALNQVRYLINEIIATYGKPYDIAVEYARDLPASAKERLKMSSMRDANELENQKIEKEMRSKIADRNYTKRDIQKYKIWKRLGCKVGNPLIKECPFTGRPISLEDLMNGQKVQIEHLIPFSRSLDDSLNNKVLAYIDANRYKGNRTPFEAFGESKDGYNWQEIKQRAKKLSAEQQWRFAPDAMKKFEEQVGPIARSLNDTRYMTRLLHDYMQPIVRKDGKQTVQAVAGALTSMVRKAWGLNLYKNKEDDEGYRAFHNHHAIDAIIVSAIERAQIASVAKILQKVSQSVIEEFRDEFPKLRDDKVFDDEKKDLKKRIKDFEQSRTLALVSEHFKMPASICVEEILNRVADINISHKPNLKNIKSPCSTVGQLHEDSAYGLQKFLSEDGLDAVFKFGKKEMEKDVTEYIPMFYDKADKKEYYDAYKEWFILDKKSSIMMAEGKEQKQYKREVAEKEKKAIARLRTASQKAFKWFIGGGNFCAEIYQIHPENRICGIPTNNRGEWKMEVVSNYNATVRQSRGENIGYWYYKYPNAKKIMRLRRNDMVMATFTKEQAFADKFPKGICEYVRGKFEQNQLLAQVDILFRVKKMVSGVITFTPHDIAKEQADTKSWSASSGAMQTYRTRKVKVTPMGRICHVK

SEQ ID NO: 475 - protein, 1146 aa, synthetic construct
  REGION 1..1146: note = MG88-13 effector
MNYRLGLDMGATSIGWSIYDVETEKLLDTGVRIFDDGREDKSKASLCVKRRNARGARKLNNRRHIKTQELLKILTTLGLFPQEQNKREDLKNDNPYKLRKEALDRQLSTYELGRTLMQLAKRKGFKSNRKDNREEGGKLKKGFAELKDIMQKENARTYGEFLYNCMQRNPDKPIRLKNTFDESGKYKGGLFPFREIYVNEFEQIWHKQKEYYPQILTDENKEKLKNIIFFQRPLKEAEEGECQFEKGEKRIPRAHPLFQEFRIWQNVLNLTFSAENEPDYKPLEKVQELIKLLMNPQEVKPNKQGIIIYANLKKGLGLDKNGVFNFERQNNRDTDLEKGLLVNTTQNAINESEFLAPYWNNFSDAQKGELINVIMRPHNYIPFPKTRISIEEEDDLIINYVRKRFNLPQEAAEELLFDIDLEDDFGSLSEKAISKILPFMKQGTPYHDACQSAGYHHSYKEYEHIDKLPYYGEILGQSCLGKKNNPKCVEEEFGKINNATVHVALNQIRHLINEIIMRYGKPYDIAVEYARDLNASTQERLAMTDTRDKNELENQRIIKELQSKLGNHPYSKNDIQKYKIWKKLPFYDKNPLIRECPFSGEQIPLSELLNGQKFQIEHLIPFSRSLDDSLNNKVIATVEANRYKGNRTPFEAFGQSKDGYNWKDIQHRAKKLSVEQQWRFAPDAMQRFEKQEGPIVRSLIDTRYMTRLLQDYLQPIVKEDGKQRVQAVVGQLTSLVRKAWGLNVYKEKADKDKYREFHNHHAIDAIVISAINRAQIKDVVGILAHVRDDIREEYKDELFQLSDNNVPEDKKREIKKEIRDVTAKREIAIAKKYFPLPKSFNIPDILQQVAAINISHKPNLKNIKQKDSTIGQLHQDTAYGLQKFVDDKSLKAIFKTKKAGDEASDDKTTPKDITQYIPMFRNKEDKKAYYDAFREWFKFNGKAASMDAKTKEDKKLKAEIAQKEQAAIQTLRQTALKAFKWFVGGNNFCAEIYEINPNNKIEGVASKDRGEWKTEIVSNYNATVRNSRGEDIAYWRYKYPNAKRIMSLRGNDMVMATFSREQAFDEKFPKGIQEYVREKFQQKSDCQELDILFRVKKMGSNGICFTPHNIAKENADTKSWIASAGAMQKYRVRKIHISYMGRIQNA

SEQ ID NO: 476 - protein, 1109 aa, synthetic construct
  REGION 1..1109: note = MG88-14 effector
MKYKLGLDLGSTSLGWAVVELNDVDNITRLVDMGVRIFPDGRDAQSHTPINVVRREHRQMRRRGDRVALRKKRTLQLIHKYGMDFDIRSNVSLENPYALRARAVVEKLQPQELGRVLFHLAVRRGFKSNRKETRGEAGGKLKNATVSLQVTMGDKTLGQFQFESHRYRFAEQFDGNKIKDGAFYPTRDMYLAEFNRICTAQGLSDEMRKEFEHAIFHQRPLLPPVIGTCMFEPGQLRAYKFEPVFQRFRVLQQINQLRIIDNGVVTELSGEQRQKLQDILLRTFDGVKRDKSGRVKITFAAVRKMLGLARGVRFNLETEKRKEMDVDTTAFAFSECGLSDFWYACPDDKKSQILARINDDTLNDDDLIGYLVDKCGLNSDVAAQLIQRPFEEGVANLSVCAMQKMLPFLAQGDLYHVAEDKAGYNHADRGVFQMAQLPYYGDVAALKPSLVPDKNGVYRTMNATVHIALNQLRAVVNDLIARFGSVPYAINIEMGRDVRAGARERAEIDSQQAANKRENDRIASELVVMGGRVSRENIQKYKLWENLGKNPLNRRCVYTGEIISKEKLFSPEFEIEHILPFSRTLDDSMANKTISAVAANRFKGNRSPDEAFTDSKSPWHYDDVVARAQNLPEATKWRFNRGAMNAFLRDQDCIARALNDTRFMTRISVTYLQHVCADKCRVTGMPGRMTAMLRDAWHLDWWKDKADAEKYRGNHIHHAIDAFVVACTGAGILQRLSRNAIETDKLFGKTQKEKRRQWFVDMNVPFDGFDYYDFKMRCENTIISYRQSQKSPKDSKGTIGCLHEDTAYNLEFFERGTTAVMSRRDALPTTDKDRKDFAKAFNNVNPKTLQMFLKDTGTTNDEPNIANKFLDWCTLRDIRKVRMYKCGVDVTTYVPVFRTKRQRDTYRAAYLNWYVASGIAGGIADKKMRLAQQEKEKALLQEFQNAAKLAYKWYVGGNNFCADVFKMRDDDKRYPKLRGRWQVEILSNYNAQLDAGSPLWRRKYATAGRVMRLRINDMVMATFSKDDPKLPKGLVETVMHQCAIENTDTVNVIFRVKKISSNGTIYLRPHFIAKEEGDTKSWAASATSLQEHNAHKVYVSPSGKLQCSE

SEQ ID NO: 477 - protein, 1147 aa, synthetic construct
  REGION 1..1147: note = MG88-15 effector
MNYRLGLDMGATSIGWSIYDINNEKILDTGVRIFDDGREAKSKASLCVKRRNARSARRLTNRRHIKTQELLKILTNIGLFPQEHNECEKLKDVNPYKLRKEALDTQLSPYELGRTIMQLAKRKGFKSNRKDNHEEGGKLKKGFEELKEIMQKENARTYGEFLYKNMLQYPGKPIRLKNTFDANGKYKGGLFPFREIYINEFEQIWNKQKEYYPQILTNGNKEKLKNIIFFQRPLKEAEEGECQFEKGEKRIPRAHPLFQEFRIWQNVLNLTFSAENEPDYRTLDNIQDLVKLLMNPQKIKPNKQGIIVYSNIKKALGLDKNGVFNFERQKNRNTDLEKGLLVNTTQNAINESKFLAPYWNNFSDEQKGELINIIMRPHNYITFPKTRISIEEEDSIIIDSLQKKFNLSLEAAEELLFDIDLENDFGSLSEKAINKILPSMKQGIPYHDACKQAGYHHSYKEYEHIDELPYYGEILGQSCLGKKTTPKCVEEEFGKINNATVHVALNQIRHLINEIIMRYGKPYDIAIEYARELNASMQERKAMTDTRDKNEQENQRILKELQDKLGNHQYSKNDIQKYKIWRKLPCYNKNPLVRECPFSGTQIPLSDLLNGQKFQIEHLIPFSRSLDDSLDNKVITTVEANRYKGNRTPFEAFGQSRDGYNWKDIQHRAKKLSIEQQWRFESDAMQRFEKQEGPIARSLNDTRYMTRLLQDYLQPIVKESGKQRVQAVVGQLTSLVRKAWGLNVYKEKADKDKYREFHNHHAIDAIVISAINRAQISNVVEVLAHVRDDIREEYKDKLQQLNDNNIPDEIKREIKKEIRDVMAKREEAIVKKYFIIPKNFNILGILQQVVAINISHKPSLKDIKQKDSTIGQLHEDTAYGMKQFVDDKSLKAIFRTKKAGEESSTDKDTVKDITQYIPMFRNKEDKKAYYDAFREWFIWDGKAASMDTKTKEDRAIKASIVKKEQEVIQALRQASLKAFKWFIGGNNFCAEIYEINPQNKICGVTTKDCGEWKSEIVSNYNATIRNNRGEDIAYWRYKYPNAKRIMSLRGNDMVMATFSREQAFDENFPKGIQEYVREKFQQKPDCKELDILFRVKKLTNNGQIFITPHNIAKENADTKSWGASASAMQKYKMRKVHISYMGRIQNA

SEQ ID NO: 478 - protein, 1183 aa, synthetic construct
  REGION 1..1183: note = MG88-16 effector
MAYKFAFDLGSTSCGWSVVEIDKNDNVIGIKDIGVRIFPDGRDDKSKEPLQVARRIARGARVRNDRILQRRHKIIDLLKQNGMIYNNNNKDKNSDERKNPYELRAKAVSEKVSLTEFGRIMYNLSLRRGFKSNRKELQKEGSGKTKQAMEKLKQELNGSTLGQYLWNKMQEYQGKAKIRFSNLFDGNKIKDGLVYPSREMYEDEFNRIWSKQTEFYDILKNEDLKNAFHNAIFYQRSLKPQTRGFCEFEDGEFRIYKAHPLFQKFRALQTINQMAVDDEPLTQEQLQILKDELLKKFQYTTKQGKLSFDKIRKILNLEKSAKINLESSGKKERTDIDADKTAYLLSRPECFGDKWFEIPFEDQCSIAEMLIGDAEDEAVKQFLQEHYDLDNEHCENIINANLEPSTGSLSKKAIEKILPYLEEGLLYDDACKMAGYHHSWFDGDIKTLPELPYYGEVLKKSCVFRGKPGEEKDPKKYQITNISVHVALNQLRLVVNELIKKYGNPDCVAVEIARDLKMGTKELSKLNSNQTKNQNENKRIIAEIQKKVSIENPSREDIQKYKMWEMLSKDETKRCCVYSGKPISIHNLFSPQVQIEHILPYSRTFDDSIFNKTLSYREANAYKGNRTPYEAFGESKDGYSWNEIMERVANLPKPTQLRFNKKAMLKIEEDLKEFGLKDMIARQLNDTRYMSRMAVQYLKHICKTECYTDKTGKEHHKTNCYGLPGSQTALFREQWGLNDWKDKENDEKYRASHIHHGIDAFVVACMTRAQLQTIASNADKIERSGNYENQKAERKALFENCNTPFKGFDRAKFNEICDKMSISFKPKLKNPKQENSTVGALHDETAYSLLEFEKGLKGVFVKREELSQFDEKKKKQKENNEDEVVEDNEQKNEGEKKKDNKKKKIDFIKSVIDTQAEQLIKEYGETEEAFNKFKEYCNKNGIKKIRCKSFAGVSAYIPIFKTKEERDEYHKAYENWFVFEGRSPENETKEQKKERQNKEQVLLEILQQKALKAYKWFVGGNNFCADVYQINPKDKIYTKERGKWQVEVLSNYMATLNKGQALWKKKHPTARLVMRLKIDDMVMCEFSKDDEKLPKGIKELVLHRCEKHKTDKIEILFRVKKISSDGSVYIRPDFITKEKSDTKSVCLSASTYQKYKIRKVFVLPAGKLIDNGFSYKWNDTKCD

SEQ ID NO: 479 - protein, 87 aa, synthetic construct
  REGION 1..87: note = MG88-17 effector
MLNIIDTQAEKLIKEYGETEEAFNKFKEYCEKNGIKKIRCKSFADVSTYIPVFKTKKERDEYHKAYEDWFVFEGRSPENETKERKAA

SEQ ID NO: 480 - protein, 184 aa, synthetic construct
  REGION 1..184: note = MG88-18 effector
MQQLQGKDKIRFSNIFDGNKIKDGSVYPSREMYEDEFNRIWQKQAEFYDILKNEDLKNAFYNAIFYQRPLKSQQRGFCEFEDGEFRIYKAHPLFQRFRALQTINQMEVDDEPLTQEQLDILKDKLFKNFKYTTKQGKLSFDKIKKLLGFNKSAKFNIEDEEKRPEIYTDKTAYLLSRPECFGDK

SEQ ID NO: 481 - protein, 184 aa, synthetic construct
  REGION 1..184: note = MG88-19 effector
MQQLQGKDKIRFSNIFDGNKIKDGSVYPSREMYEDEFNRIWKKQAEFYEILKNEDLKNAFYNAIFYQRPLKSQQRGFCEFEDGEFRIYKAHPLFQRFRALQTINQMEVDDEPLTQEQLDILKDKLFKNFKYTTKQGKLSFDKIKKLLGFNKSAKFNIEDEEKRPEIYTDKTAYLLSRPECFGDK

SEQ ID NO: 482 - protein, 216 aa, synthetic construct
  REGION 1..216: note = MG88-20 effector
MFLFRTKRQRDTYRAAYLNWYVASGIASGIADKKMRLAQQEKEKALLQEFQNAAKLAYKWYVGGNNFCADVFKMRDDDKRYPKLRGRWQVEILSNYNAQLDAGSPLWRRKYATAGRVMRLRINDMVMATFSKDDPKLPKGLVKTVMHQCTIENTDTVNVIFRVKKISSSGTIYLRPHFIAKEEGDTKSWIASAASLQEHSAHKVYVSPSGKLQCSE

SEQ ID NO: 483 - protein, 1113 aa, synthetic construct
  REGION 1..1113: note = MG89-1 effector
MSYVLGLDLGIASVGWSIVEPGKRIIDLGVRVFKKAETDKEGEPLNLIRRESRLSRRRLYRRSHRLNRLLNFLISSGLIHSKDEVLKNVYNENPWALRTLGLNSVLTNNQLARVIYHICKHRGFYWASSADDGEADKGKIKNSLSSNQKLMKEKCYKTVGQMIFSEYPNCQRNKSGEYSKSLPRTDLDIELREIFKAQQSFSNPIVTKDFISAILGSGDRKTGFLWEQRPALQGEDLLKMVGHCRFEKDELRVPAANFYAEQLVWLTRINNLRVYDENSQERPLTKEEHDLILNMPLEMKSDIKYSSLTSAFVKANLWKPGQFKYKSVDYEQKTQKKKKSAEPSDITKSSKKNPEDKVFYKCSHLHEIRKALGSSLSAEWDKIRTEVLAGKYERYNRIAYVLTVYKEDSDVIEHLSLYESRALIDALLTVRFKEFVALSEKALKKIIPYMVQGKRYDEACSESGYKHYKQNQNDVKKSKYLPPLFSGREPNGTLIFNEDLGDIPRNPVVLRVINQTRKVVNAIVKKYGSPESVHIELARDLAKSRAERNEIKKRNEEAASRRIKEREEFEKHYGAEKTNGTNLLKYRLYKEQDCKSMYSGKEIDHKRLFEKGYVQIDHILPYSRSYDDSQSNKVLVLTNENQDKGNRIPFEYFETKQQGFSWYEFEQWVKSCKNINQKKKRNLLRRSLSKDAKKDFLERNLNDTRYACRFVKNYIDRFLCLSENSDNSGCVVVAGQLTAYLRNCWGLNKVREENDRHHALDATVVACCTRKIVQKVGAWSKSREMNSYNSSYVDPDLPVDEDEMLLQKLYVNKRKPDFPKPWNCFRNEVKSRVFESDLEKLKEELKQQCSYTESDLKNVRTLFVSRACEKIGKGALHGDTVYRQTSEMRKENVAVKKVSLKKLKYARIGAIVDADTRNKNLCDALKKRYEEYSSITGKDVSKIDKKDLSKIFSDDKPMHMPNSEGQEDPCNPIVKSVRVKEACSGVPIRNGVAENSTIVRVDIFKKKGQYYFVPIYSWNKSLPNRACQGKNKSDWVVVDDSYEWCFSVRTNDLLKIVIKGKTYFDYYITLDVHSDGRIRLLNHDRQEDDVHYEKGEFRILIKNADSINIMLMF

SEQ ID NO: 484 - protein, 1129 aa, synthetic construct
  REGION 1..1129: note = MG89-2 active effector
MSYVLGLDLGIASVGWSIVEPGNRIIDLGVRVFKKAETDKEGDPLNLIRRESRLSRRRLYRRAHRLSRLLNFLISSGLIHSKDEVLKNVYNENPWALRTLGLNSVLTNNQLARVIYHICKHRGFYWASSADDGQADNGKIKKSLSSNQLVMKEKGYKTVGQMIFTEYPNCQRNKSGEYSKSLPRTDLDKELRAIFKAQQSFSNPIVTKDFINAIVGCGDRKTGFLWEQRPALQGEDLLKMVGHCRFEKDELRAPAANFYSEQLVWLTKINNLRVYDEDSQERPLTREERDLILNMPLEMKSDIKYSSLTSAFEKANLWKSGQFKYKSVDYEQKTQKKKNTAKSVDITKSSKKNPEDKVFYKSSHLHEIRKALGSSLSEEWEKIRTEVLSGKYDRYNRIAYVLTVYKEDSDVIEQLSPYESRTLIEALLPVRFSGFVALSEKSLKKIIPHMVLGKRYDEACSEANYKHYKQNQAEFKKLKYLPPLFSGREPNGTLIFNEEIGDIPRNPVVLRVINQTRKVVNAIVKKYGSPKSVHIELARDLAKSRAERNEIEKRNEEAASRHIKERDEFEKLFGSKCLNGTNLLKYRLYKEQDCKSMYSSKEIDHKRLFEKGYVQIDHILPYSRSYDDSQSNKVLVLTNENQDKGNRIPFEYFEAKQHGFSWYEFEQWVKSCKNLNQKKKRNLLRCSLSKDAKKDFLERNLNDTRYACRFVKNYIDSFLCLSENSDNSGCVVVAGQLTAYLRNCWGLNKVREENDRHHALDATVIACCTRKIVQKVGAWSKSREMNSYNSSYVDPDSPVDEDEKLLQKLYVNTRKPDFPKPWECFRSEVESRVFESALEKLKEKLKLQCSYTESELKNVRTLFVSRACEKIGKGALHGDTVYRQTSEMRKENVAVKKVSLKKLKYARIEAIVDADTRNKNLCDALKKRYEEYARKIGKKIEDFVDKDIAKIFADDNPLHMPNSDGQEDPCNPIVKSVRVKEAFSGVPIRNGVAGNSTIIRVDLFKKDGKYYCIPVYAWNKTLPNRAYVSGKKETDWALVDDSFEWCFSIRQNELLKIKLKGETIFGYYNGFDRDRGSFNILLHDRQDGKDHKQGLIRKGIKTAISITKYDVDVLGNYYLSKPEKRLELA

SEQ ID NO: 485 - protein, 1141 aa, synthetic construct
  REGION 1..1141: note = MG89-3 active effector
MDLIFGLDLGIASVGWSVVDDENKRIVDLGVRAFKAAETEDKGKSLNLVRRTSRLSRRRIYRRANRLNSLLNYLIKSGLISSKDEILNNEHHENPWNLRVKGLDGVLSNNQLARIIYHICKHRGFYWSSSAEETEDTEKGKIKKCLAQNSLALTNEHFRTIGETILNKYPDAQRNKADEYTKSISRVLLNEELKQILTVQKEVFHNPLLTDDFFKAILGTGDKKSGFLWKQKPPLQGEQLLKMVGHCRFEKDELRSPKANYFAERHVWLTKLLNLRIYSEDCEDRALTVEEISIVINKIYEQKSDIRYSSLTTAFVKSGIWPKNHQYKYKGLNYDQLTSSKKKKVEDTASTSEDSTDTKKTAKKTNPESKIFYKSSCYQNIKDAYMSNSLEQEWNILSTQISQGNYDRYNRIAYILSIYKDDEEVKKHLLDCGEKSEVAEALLKIRFNGFSALSEKALKKIVPIMEQGKRFDVACSEAGYAHYKQSQDSKEKRKYLPPLFSGREPNGTLIINSELDDLPRNPVVMRVINQTRKVVNALVKKYGSPKSVHIELARDLSKTFEERIDIQKRQEEIKERRQKEQEEFDRIFGVGIRSGKNLEKYSLYKQQDCKSIYSGETIDLGRLFEQGYVEVDHVLPYSRSFNDSQDNKVLVLTKENQNKGNMLPYEYFMSHNLDWNQFEARVLSNKKLRKNKRCNLLKKSLNRNSKKEFLDRNLNDTRYACRFVKNFIDKYLRLSDKADKSGCVVVSGQLTAYLRKHWGLNKNRSENDRHHAVDATVVACCSRRMVQLIGYWSKHKERQYLKDSQSDPDLESDEELLLKKSIGSQKLYFPYPWVKFRKELNLRVFSSDIEELKNELSLFESYTEEDISKVKTLFVSRAIQKIGRGALHADTVRSQTEEMNKEKVAVSRVKLSELSYDRISKIVDSDTRNKNLCNALKRRFEAYCKSNNINEISKLKAKDSAKIFTTNNPMHMPNSNGEEDPLNPVVRTVRVKETFSGVPIRHGIAGNGDIFRVDIFFKEGKYYLVPIYAIAKELPNRACVAKKHESEWTVIDDTYQWCFSVTQYDLIKIELKKETYFGYFNGFDRATGAVNIILHDRSTEKYKKGLIRSIGLKTAKSVTKYRVDVLGNYYLAGAEKRLELA

SEQ ID NO: 486 - protein, 1130 aa, synthetic construct
  REGION 1..1130: note = MG89-4 effector
MSYVLGLDLGIASVGWSIVEPGKRIIDLGVRVFKKAETDKEGEPLNLIRRESRLSRRRLYRRAHRLNRLLNFLISSGLIHSKDEVLKNVYNENPWALRTLGLNSVLTNNQLARVIYHICKHRGFYWASSADDGETDKGKIKNSLSSNQKLMKEKCYKTVGQMIFSEYPNCQRNKSGEYSKSLPRTDLDIELREIFKAQQSFSNPIVTKDFISAILGSGDRKTGFLWEQRPALQGEDLLKMVGHCRFEKDELRAPAANFYAEQLVWLTRINNLRVYDENSQERPLTKEEHDLILNMPLEMKSDIKYSSLTSAFVKANLWKPGQFKYKSVDYEQKTQKKKKSAEPSDITKSSKKNPEDKVFYKCSHIHEIRKALGSSLSAEWDKIRTEVLAGKYERYNRIAYVLTVYKEDSDVIEHLSLYESRALIDALLTVRFKEFVALSEKALKKIIPYMVQGKRYDEACSESGYKHYKQNQNDVKKSKYLPPLFSGREPNGTLIFNEDLGDIPRNPVVLRVINQTRKVVNAIVKKYGSPESVHIELARDLAKSRAERNEIKKRNEEAASRRIKEREEFEKHYGAEKTNGTNLLKYRLYKEQDCKSMYSGKEIDHKRLFEKGYVQIDHILPYSRSYDDSQSNKVLVLTNENQDKGNRIPFEYFETKQQGFSWYEFEQWVKSCKNINQKKKRNLLRRSLSKDAKKDFLERNLNDTRYACRFVKNYIDRFLCLSENSDNSGCVVVAGQLTAYLRNCWGLNKVREENDRHHALDATVIAWCTRKIVQKVGAWSKSREMNSYNSSYVDPDLPVDEDEMLLQKLYVNKRKPDFPKPWNCFRNEVESRVFESDLEKLKEELKQQCSYTESDLKNVRTLFVSRACEKIGKGALHGDTVYRQTSEMRKENVAVKKVSLKKLKYARIGAIVDADTRNKNLCDALKKRYEEYSSITGKDVSKIDKKDLSKIFSDDKPMHMPNSEGQEDPCNPIVKSVRVKEACSGVPIRNGVAENSTIVRVDIFKKKSQYYFVPIYSWNKSLPNRACQGKNKSDWVVVDDSYEWCFSVRTNDLLKIVIKGKTYFDYYITLDVHSDGRIRLLNHDRQEDDVHYEKGEFRILIKNADSINKYNVDVLGNYYLAKPEKRLELA

SEQ ID NO: 487 - protein, 604 aa, synthetic construct
  REGION 1..604: note = MG89-5 effector
MGSPESVHIELARDLAKSRAERNEIEKRNEDAASRRIKEREEFKKHYGAEKTNGTNLLKYRLYKEQDCKSMYSCKTIDINRLFEEGYVQIDHILPYSRSYDDSQSNKVLVLTKENQDKGNRIPYEYFESKQIDISWYEFEQWVKSCKNLNQKKKRNLLRNSLSKDAKKDFLERNLNDTRYACRFMKNYIDRFLCLSENSDKSGCVVVAGQLTANLRNCWGLNKVREENDRHHALDATVIACCTRKIVQKVGAWSKAREVEFNNSSYDDPDLPIDENELLLLNTFKNVKEPKFTEPWHCFREEVEARVFECDLEKLKKELKQQCSYTESDLKNVRTLFVSRACEKIGKGALHKDTVYRQTSEMRKENLAIKKVSLKKLKYAKISSIVDADTRNKNLCDALRKRYEEYSSTTGKDVSKIEEKDLAKIFSDDKPMHMPNSEGQEDPCNPIVKSVRVKDACSGVHIRNGVAENDNIMRVDIFKKRGKYYCIPIYAWNKTLPNKACVARKNESDWVEIDDSYEWCFSVRTNDLIRIDGKKESFFGYFNGFHRSVASFSILFHDRQISKKYKKGEKEGIGVKTAYSLTKYNVDVLGYYYLAKPEKRLELA

SEQ ID NO: 488 - protein, 472 aa, synthetic construct
  REGION 1..472: note = MG89-6 effector
MYRRAHRLNRLLNFLISSGLIHSKDEVLKNVYNENPWALRTLGLNSVLTNNQLARVIYHICKHRGFYWASSADDGQADNGKIKKSLSSNQLIMKEKGYKTVGQMIFTEYPNCQRNKSGEYSKSLPRTDLDKELRAIFKAQQSFSNPIVTKDFINAIVGIGDRKTGFLWEQRPALQGEDLLKMVGHCRFEKDELRAPAANFYSEQLVWLTKINNLRVYDEDSQERPLTREERNLILNMPLEMKSDIKYSSLTSAFEKASLWKAGQFKYKSVDYEQKTQKKKKTAKSADITKSSKKNPEDKVFYKSSHLHEIRKALGSSLSEEWEKIRTEVLSGKYDRYNRIAYVLTVYKEDSDVIEQLSPYESRTLIEALLPVRFNGFVSLSEKSLKKIIPYMVLGKRYDEACSEAGYKHYKQNQAKVKKSKYLPSLFSGREPNGTLIFNEEIGDIPRNPVVLRVINQTRKVVNAIVKKYGIS

SEQ ID NO: 489 - protein, 1127 aa, synthetic construct
  REGION 1..1127: note = MG89-7 effector
MSYVLGLDLGIASVGWSIVEPGKRIIDLGVRVFKKAETDKEGEPLNLIRRESRLSRRRLYRRAHRLNRLLNFLISSGLIHSKDEVLKNVYNENPWALRTLGLNSVLTNNQLARVIYHICKHRGFYWASSADDGEADKGKIKNSLSSNQKLMKEKCYKTVGQMIFSEYPNCQRNKSGEYSKSLPRTDLDIELREIFKAQQSFSNPIVTKDFISAILGSGDRKTGFLWEQRPALQGADLLKMVGHCRFEKDELRAPAANFYAEQLVWLTRINNLRVYDEDSQERPLTREERDLILNMPLEMKSDIKYSSLTSAFEKANLWKAGQFKYKSVDYEQKTQKKKKSAEPSDITKSSKKNPEDKVFYKSSHLHKIRKALGSSLSEEWEKIRTEVLSGKYERYNRIAYVLTVYKEDSDVIEQLSPYESRTLIEALLPVRFSGFVALSEKSLKKIIPHMFLGKRYDEACSEAHYKQNQSEGKKSKYLPHLFSGREPNGTLIFNEEIGDIPRNPVVLRVINQTRKVVNAIVKKYGSPESVHIELARDLAKSRAERNEIKKRNEEAASRRIKEREEFEKHYGAEKPNGTNLLKYRLYKEQDCKSMYSGKEIDHKRLFEKGYVQIDHILPYSRSYDDSQSNKVLVLTNENQDKGNRIPFEYFETKQQGFSWYEFEQWVKSCKNINQKKKRNLLRRSLSNDAKKDFLERNLNDTRYACRFVKNYIDRFLCLSENSDNSGCVVVAGQLTAYLRNCWGLNKVREENDRHHALDATVIACCTRKIVQKVGVWSKSREMNSYNSSYVDPDLPVDEDEMLLQKLYVNKRKPDFPKPWNCFRNEVESRVFESDLEKLKEELKQQCSYTESDLKNVRTLFVSRACEKIGKGALHGDTVYRQTSEMRKENVAVKKVSLKKLKYARIGAIVDADTRNKNLCDALKKRYEEYSSITGKDVSKIDKKDLSKIFSDDKPMHMPNSEGQEDPCNPIVKSVRVKEACSGVPIRNGVAENSTIVRVDIFKKKGQYYFVPIYSWNKSLPNRACQGKNKSDWVVVDDSYEWCFSVRTNDLLKIVIKGKTYFDYYITLDVHSDGRIRLLNHDRQEDDVHYEKGEFRILIKNADSINKYNVDVLGNYYLAKPEKRLELA

SEQ ID NO: 490 - protein, 913 aa, synthetic construct
  REGION 1..913: note = MG89-8 effector
MGSGDRKTGFLWEQRPALQGADLLKMVGHCRFEKDELRAPAANFYAEQLVWLTRINNLRVYDEDSQERPLTREERDLILNMPLEMKSDIKYSSLTSAFEKANLWKAGQFKYKSVDYEQKTQKKKKSAEPSDITKSSKKNPEDKVFYKSSHLHKIRKALGSSLSEEWEKIRTEVLSGKYERYNRIAYVLTVYKEDSDVIEQLSPYESRTLIEALLPVRFSGFVALSEKSLKKIIPHMFLGKRYDEACSEAHYKQNQSEGKKSKYLPHLFSGREPNGTLIFNEEIGDIPRNPVVLRVINQTRKVVNAIVKKYGSPESVHIELARDLAKSRAERNEIKKRNEEAASRRIKEREEFEKHYGAEKPNGTNLLKYRLYKEQDCKSMYSGKEIDHKRLFEKGYVQIDHILPYSRSYDDSQSNKVLVLTNENQDKGNRIPFEYFETKQQGFSWYEFEQWVKSCKNINQKKKRNLLRRSLSNDAKKDFLERNLNDTRYACRFVKNYIDRFLCLSENSDNSGCVVVAGQLTAYLRNCWGLNKVREENDRHHALDATVIACCTRKIVQKVGVWSKSREMNSYNSSYVDPDLPVDEDEMLLQKLYVNKRKPDFPKPWNCFRNEVESRVFESDLEKLKEELKQQCSYTESDLKNVRTLFVSRACEKIGKGALHGDTVYRQTSEMRKENVAVKKVSLKKLKYARIGAIVDADTRNKNLCDALKKRYEEYSSITGKDVSKIDKKDLSKIFSDDKPMHMPNSEGQEDPCNPIVKSVRVKEACSGVPIRNGVAENSTIVRVDIFKKKGQYYFVPIYSWNKSLPNRACQGKNKSDWVVVDDSYEWCFSVRTNDLLKIVIKGKTYFDYYITLDVHSDGRIRLLNHDRQEDDVHYEKGEFRILIKNADSINKYNVDVLGNYYLAKPEKRLELA

SEQ ID NO: 491 - protein, 1129 aa, synthetic construct
  REGION 1..1129: note = MG89-9 effector
MNMSYVLGLDLGIASVGWSIVEPGKRIIDLGVRVFKKAETDKEGDPLNLIRRESRLSRRRLYRRAHRLNRLLNFLISSGLIHSKDEVLKNVYNENPWALRTLGLNSVLTNNQLARVIYHICKHRGFYWASSADDGQADNGKIKKSLSSNQLIMKEKGYKTVGQMIFTEYPNCQRNKSGEYSKSLPRTDLDKELRAIFKAQQSFSNPIVTKDFINAIVGIGDRKTGFLWEQRPALQGEDLLKMVGHCRFEKDELRAPAANFYSEQLVWLTKINNLRVYDEDSQERPLTREERDLILNMPLEMKSDIKYSSLTSAFEKANLWKAGQFKYKSVDYEQKTQKKKKSAEPSDITKSSKKNPEDKVFYKSSHLHKIRKALGSSLSEEWEKIRTEVLSGKYERYNRIAYVLTVYKEDSDVIKQLSPYESRTLIEALLPVRFSGFVALSEKSLKKIIPHMFLGKRYDEACSEAHYKQNQSEGKKSKYLPHLFSGREPNGTLIFNEEIGDIPRNPVVLRVINQTRKVVNAIVKKYGSPESVHIELARDLAKSRAERNEIKKRNEEAASRRIKEREEFEKHYGAEKTNGTNLLKYRLYKEQDCKSMYSGKEIDHKRLFEKGYVQIDHILPYSRSYDDSQSNKVLVLTNENQDKGNRIPFEYFETKQQGFSWYEFEQWVKSCKNINQKKKRNLLRRSLSNDAKKDFLERNLNDTRYACRFVKNYIDRFLCLSENSDNSGCVVVAGQLTAYLRNCWGLNKVREENDRHHALDATVIACCTRKIVQKVGVWSKSREMNSYNSSYVDPDLPVDEDEMLLQKLYVNKRKPDFPKPWNCFRNEVESRVFESDLEKLKEELKQQCSYTESDLKNVRTLFVSRACEKIGKGALHGDTVYRQTSEMRKENVAVKKVSLKKLKYARIGAIVDADTRNKNLCDALKKRYEEYSSITGKDVSKIDKKDLSKIFSDEKPMHMPNSEGQEDPCNPIVKSVRVKEACSGVPIRNGVAENSTIVRVDIFKKKGQYYFVPIYSWNKSLPNRACQGKNKSDWVVVDDSYEWCFSVRTNDLLKIVIKGKTYFDYYITLDVHSDGRIRLLNHDRQEDDVHYEKGEFRILIKNADSINKYNVDVLGNYYLAKPEKRLELA

SEQ ID NO: 492 - protein, 1127 aa, synthetic construct
  REGION 1..1127: note = MG89-10 effector
MSYVLGLDLGIASVGWSIVEPGKRIIDLGVRVFKKAETDKEGEPLNLIRRESRLSRRRLYRRAHRLNRLLNFLISSGLIHSKDEVLKNVYNENPWALRTLGLNSVLTNNQLARVIYHICKHRGFYWASSADDGEADKGKIKNSLSSNQKLMKEKCYKTVGQMIFSEYPNCQRNKSGEYSKSLPRTDLDIELREIFKAQQSFSNPIVTKDFISAILGSGDRKTGFLWEQRPALQGADLLKMVGHCRFEKDELRAPAANFYAEQLVWLTRINNLRVYDEDSQERPLTREERDLILNMPLEMKSDIKYSSLTSAFEKANLWKAGQFKYKSVDYEQKTQKKKKSAEPSDITKSSKKNPEDKVFYKSSHLHKIRKALGSSLSEEWEKIRTEVLSGKYERYNRIAYVLTVYKEDSDVIEQLSPYESRTLIEALLPVRFSGFVALSEKSLKKIIPHMFLGKRYDEACSEAHYKQNQSEGKKSKYLPHLFSGREPNGTLIFNEEIGDIPRNPVVLRVINQTRKVVNAIVKKYGSPESVHIELARDLAKSRAERNEIKKRNEEAASRRIKEREEFEKHYGAEKPNGTNLLKYRLYKEQDCKSMYSGKEIDHKRLFEKGYVQIDHILPYSRSYDDSQSNKVLVLTNENQDKGNRIPFEYFETKQQGFSWYEFEQWVKSCKNINQKKKRNLLRRSLSNDAKKDFLERNLNDTRYACRFVKNYIDRFLCLSENSDNSGCVVVAGQLTAYLRNCWGLNKVREENDRHHALDATVIACCTRKIVQKVGVWSKSREMNSYNSSYVDPDLPVDEDEMLLQKLYVNKRKPDFPKPWNCFRNEVESRVFESDLEKLKEELKQQCSYTESDLKNVRTLFVSRACEKIGKGALHGDTVYRQTSEMRKENVAVKKVSLKKLKYARIGAIVDADTRNKNLCDALKKRYEEYSSITGKDVSKIDKKDLSKIFSDDKPMHMPNSEGQEDPCNPIVKSVRVKEACSGVPIRNGVAENSTIVRVDIFKKKGQYYFVPIYSWNKSLPNRACQGKNKSDWVVVDDSYEWCFSVRTNDLLKIVIKGKTYFDYYITLDVHSDGRIRLLNHDRQEDDVHYENGEFRILIKNADSINKYNVDVLGNYYLAKPEKRLELA

SEQ ID NO: 493 - protein, 1129 aa, synthetic construct
  REGION 1..1129: note = MG89-11 effector
MSYVLGLDLGIASVGWSIVEPGNRIIDLGVRVFKKAETDKEGDPLNLIRRESRLSRRRLYRRAHRLSRLLNFLISSGLIHSKDEVLKNVYNENPWALRTLGLNSVLTNNQLARVIYHICKHRGFYWASSADDGQADNGKIKKSLSSNQLVMKEKGYKTVGQMIFTEYPNCQRNKSGEYSKSLPRTDLDKELRAIFKAQQSFSNPIVTKDFINAIVGCGDRKTGFLWEQRPALQGEDLLKMVGHCRFEKDELRAPAANFYSEQLVWLTKINNLRVYDEDSQERPLTREERDLILNMPLEMKSDIKYSSLTSAFEKANLWKSGQFKYKSVDYEQKTQKKKNTAKSVDITKSSKKNPEDKVFYKSSHLHEIRKALGSSLSEEWEKIRTEVLSGKYDRYNRIAYVLTVYKEDSDVIEQLSPYESRTLIEALLPVRFSGFVALSEKSLKKIIPHMVLGKRYDEACSEANYKHYKQNQAEFKKLKYLPPLFSGREPNGTLIFNEEIGDIPRNPVVLRVINQTRKVVNAIVKKYGSPKSVHIELARDLAKSRAERNEIEKRNEEAASRHIKERDEFEKLFGSNCLNGTNLLKYRLYKEQDCKSMYSGKEIDHKRLFEKGYVQIDHILPYSRSYDDSQSNKVLVLTNENQDKGNRIPFEYFEAKQHGFSWYEFEQWVKSCKNLNQKKKRNLLRCSLSKDAKKDFLERNLNDTRYACRFVKNYIDSFLCLSENSDNSGCVVVAGQLTAYLRNCWGLNKVREENDRHHALDATVIACCTRKIVQKVGAWSKSREMNSYNSSYVDPDSPVDEDEKLLQKLYVNTRKPDFPKPWECFRSEVESRVFESALEKLKEKLKLQCSYTESELKNVRTLFVSRACEKIGKGALHGDTVYRQTSEMRKENVAVKKVSLKKLKYARIGAIVDADTRNKNLCDALKKRYEEYARKIGKKIEDFVDKDIAKIFADDNPLHMPNSDGQEDPCNPIVKSVRVKEAFSGVPIRNGVAGNSTIIRVDLFKKDGKYYCIPVYAWNKTLPNRAYVSGKKETDWALVDDSFEWCFSIRQNELLKIKLKGETIFGYYNGFDRDRGSFNILLHDRQDGKDHKQGLIRKGIKTAISITKYDVDVLGNYYLSKPEKRLELA

SEQ ID NO: 494 - protein, 1130 aa, synthetic construct
  REGION 1..1130: note = MG89-12 effector
MSYVLGLDLGIASVGWSIVEPGKRIIDLGVRVFKKAETDKEGEPLNLIRRESRLSRRRLYRRSHRLNRLLNFLISSGLIHSKDEVLKNVYNENPWALRTLGLNSVLTNNQLARVIYHICKHRGFYWASSADDGEADKGKIKNSLSSNQKLMKEKCYKTVGQMIFSEYPNCQRNKSGEYSKSLPRTDLDIELREIFKAQQSFSNPIVTKDFISAILGSGDRKTGFLWEQRPALQGEDLLKMVGHCRFEKDELRAPAANFYAEQLVWLTRINNLRVYDENSQERPLTKGEHDLILNMPLEMKSDIKYSSLTSAFVKANLWKPGQFKYKSVDYEQKTQKKKKSAEPSDITKSSKKNPEDKVFYKCSHLHEIRKALGSSLSAEWDKIRTEVLAGKYERYNRIAYVLTVYKEDSDVIEHLSLYESRALIDALLTVRFKEFVALSEKALKKIIPYMVQGKRYDEACSESGYKHYKQNQNDVKKSKYLPPLFSGREPNGTLIFNEDLGDIPRNPVVLRVINQTRKVVNAIVKKYGSPESVHIELARDLAKSRAERNEIKKRNEEVASRRIKEREEFEKHYGAEKTNGTNLLKYRLYKEQDCKSMYSGKEIDHKRLFEKGYVQIDHILPYSRSYDDSQSNKVLVLTNENQDKGNRIPFEYFETKQQGFSWYEFEQWVKSCKNINQKKKRNLLRRSLSKDAKKDFLERNLNDTRYACRFVKNYIDRFLCLSENSDNSGCVVVAGQLTAYLRNCWGLNKVREENDRHHALDATVIACCTRKIVQKVGAWSKSREMNSYNSSYVDPDLPVDEDEMLLQKLYVNKRKPDFPKPWNCFRNEVESRVFESDLEKLKEELKQQCSYTESDLKNVRTLFVSRACEKIGKGALHGDTVYRQTSEMRKENVAVKKVSLKKLKYARIGAIVDADTRNKNLCDALKKRYEEYSSITGKDVSKIDKKDLSKIFSDDKPMHMPNSEGQEDPCNPIVKSVRVKEACSGVPIRNGVAENSTIVRVDIFKKKGQYYFVPIYSWNKSLPNRACQGKNKSDWVVVDDSYEWCFSVRTNDLLKIVIKGKTYFDYYITLDVHSDGRIRLLNHDRQEDDVHYEKGEFRILIKNADSINKYNVDVLGNYYLAKPEKRLELA

SEQ ID NO: 495 - protein, 1130 aa, synthetic construct
  REGION 1..1130: note = MG89-13 effector
MSYVLGLDLGIASVGWSIVEPGKRIIDLGVRVFKKAETDKEGEPLNLIRRESRLSRRRLYRRAHRLNRLLNFLISSGLIHSKDEVLKNVYNENPWALRTLGLNSVLTNNQLARVIYHICKHRGFYWASSADDGQADNGKIKKSLSSNQKLMKEKCYKTVGQMIFSEYPNCQRNKSGEYSKSLPRTDLDIELREIFKAQQSFSNPIVTKDFISAILGSGDRKTGFLWEQRPALQGADLLKMVGHCRFEKDELRAPAANFYAEQLVWLTRINNLRVYDEDSQERPLTREERDLILNMPLEMKSDIKYSSLTSAFVKANLWKPGQFKYKSVDYEQKTQKKKKSAEPSDITKSSKKNPEDKVFYKCSHLHEIRKALGSSLSAEWDKIRTEVLAGKYERYNRIAYVLTVYKEDSDVIEHLSLYESRALIDALLTVRFKEFVALSEKALKKIIPYMVQGKRYDEACSESGYKHYKQNQNDVKKSKYLPPLFSGREPNGTLIFNEDLGDIPRNPVVLRVINQTRKVVNAIVKKYGSPESVHIELARDLAKSRAERNEIKKRNEEVASRRIKEREEFEKHYGAEKTNGTNLLKYRLYKEQDCKSMYSGKEIDHKRLFEKGYVQIDHILPYSRSYDDSQSNKVLVLTNENQDKGNRIPFEYFETKQQGFSWYEFEQWVKSCKNINQKKKRNLLRRSLSKDAKKDFLERNLNDTRYACRFVKNYIDRFLCLSENSDNSGCVVVAGQLTAYLRNCWGLNKVREENDRHHALDATVIACCTRKIVQKVGAWSKSREMNSYNSSYVDPDLPVDEDEMLLQKLYVNKRKPDFPKPWNCFRNEVESRVFESDLEKLKEELKQQCSYTESDLKNVRTLFVSRACEKIGKGALHGDTVYRQTSEMRKENVAVKKVSLKKLKYARIGAIVDADTRNKNLCDALKKRYEEYSSITGKDVSKIDKKDLSKIFSDDKPMHMPNSEGQEDPCNPIVKSVRVKEACSGVPIRNGVAENSTIVRVDIFKKKGQYYFVPIYSWNKSLPNRACQGKNKSDWVVVDDSYEWCFSVRTNDLLKIVIKGKTYFDYYITLDVHSDGRIRLLNHDRQEDDVHYEKGEFRILIKNADSINKYNVDVLGNYYLAKPEKRLELA

SEQ ID NO: 496 - protein, 1058 aa, synthetic construct
  REGION 1..1058: note = MG89-14 effector
MISSGLIHSKDEVLKNVYNENPWALRTLGLNSVLTNNQLARVIYHICKHRGFYWASSADDGQADNGKIKKSLSSNQKLMKEKCYKTVGQMIFSEYPNCQRNKSGEYSKSLPRTDLDIELREIFKAQQSFSNPIVTKDFISAILGSGDRKTGFLWEQRPALQGADLLKMVGHCRFEKDELRAPAANFYAEQLVWLTRINNLRVYDEDSQERPLTREERDLILNMPLEMKSDIKYSSLTSAFVKANLWKPGQFKYKSVDYEQKTQKKKKSAEPSDITKSSKKNPEDKVFYKCSHLHEIRKALGSSLSAEWDKIRTEVLAGKYERYNRIAYVLTVYKEDSDVIEHLSLYESRALIDALLTVRFKEFVALSEKALKKIIPYMVQGKRYDEACSESGYKHYKQNQNDVKKSKYLPPLFSGREPNGTLIFNEDLGDIPRNPVVLRVINQTRKVVNAIVKKYGSPESVHIELARDLAKSRAERNEIKKRNEEVASRRIKEREEFEKHYGAEKTNGTNLLKYRLYKEQDCKSMYSGKEIDHKRLFEKGYVQIDHILPYSRSYDDSQSNKVLVLTNENQDKGNRIPFEYFETKQQGFSWYEFEQWVKSCKNINQKKKRNLLRRSLSKDAKKDFLERNLNDTRYACRFVKNYIDRFLCLSENSDNSGCVVVAGQLTAYLRNCWGLNKVREENDRHHALDATVIACCTRKIVQKVGAWSKSREMNSYNSSYVDPDLPVDEDEMLLQKLYVNKRKPDFPKPWNCFRNEVESRVFESDLEKLKEELKQQCSYTESDLKNVRTLFVSRACEKIGKGALHGDTVYRQTSEMRKENVAVKKVSLKKLKYARIGAIVDADTRNKNLCDALKKRYEEYSSITGKDVSKIDKKDLSKIFSDDKPMHMPNSEGQEDPCNPIVKSVRVKEACSGVPIRNGVAENSTIVRVDIFKKKGQYYFVPIYSWNKSLPNRACQGKNKSDWVVVDDSYEWCFSVRTNDLLKIVIKGKTYFDYYITLDVHSDGRIRLLNHDRQEDDVHYEKGEFRILIKNADSINKYNVDVLGNYYLAKPEKRLELA

SEQ ID NO: 497 - protein, 1130 aa, synthetic construct
  REGION 1..1130: note = MG89-15 effector
MSYVLGLDLGIASVGWSIVEPGNRIIDLGVRVFKKAETDKEGDPLNLIRRESRLSRRRLYRRAHRLSRLLNFLISSGLIHSKDEVLKNVYNENPWELRTLGLNSVLTNNQLARVIYHICKHRGFYWASSADDGQADSGKIKKSLSSNQLVMKEKGYKTVGQMIFTEYPNCQRNKSGEYSKSLPRTDLDKELRAIFKAQQSFSNPIVTKDFINAIVGCGDRKTGFLWEQRPALQGEDLLKMVGHCRFEKDELRAPAANFYSEQLVWLTKINNLRVYDEDSQERPLTREERDLILNMPLEMKSDIKYSSLTSAFEKANLWKSGQFKYKSVDYEQKIQKKKNTAKSVDITKSSKKNPEDKVFYKSSHLHEIRKALGSSLSEEWEKIRTEVLSGKYVRYNRIAYVLTVYKEDSDVIEQLSPYESRTLIEALLPVRFSGFVALSEKSLKKIIPHMVLGKRYDEACSEANYKHYKQNQAESKKLKYLPPLFSGREPNGTLIFNEEIGDIPRNPVVLRVINQTRKVVNAIVKKYGSPESVHIELARDLAKSRAERNEIKKRNEEAASRRIKEREEFEKHYGAEKPNGTNLLKYRLYKEQDCKSMYSGKEIDYKRLFEKGYVQIDHILPYSRSYDDSQSNKVLVLTNENQDKGNRIPFEYFETKQQGFSWYEFEQWVKSCKNINQKKKRNLLRRSLSNDAKKDFLERNLNDTRYACRFVKNYIDRFLCLSENSDNSGCVVVAGQLTAYLRNCWGLNKVREENDRHHALDATVIACCTRKIVQKVGVWSKSREMNSYNSSYVDPDLPVDEDEMLLQKLYVNKRKPDFPKPWNCFRNEVESRVFESDLEKLKEELKQQCSYTESDLKNVRTLFVSRACEKIGKGALHGDTVYRQTSEMRKENVAVKKVSLKKLKYARIGAIVDADTRNKNLCDALKKRYEEYSSSTGKDVSKIDKKDLSKIFSDDKPMHMPNSEGQEDPCNPIVKSVRVKEACSGVPIRNGVAENSTIVRVDIFKKKGQYYFVPIYSWNKSLPNRACQGKNKSDWVVVDDSYEWCFSVRTNDLLKIVIKGKTYFDYYITLDVHSDGRIRLLNHDRQEDDVHYEKGEFRILIKNADSINKYNVDVLGNYYLAKPEKRLELA

SEQ ID NO: 498 - protein, 1127 aa, synthetic construct
  REGION 1..1127: note = MG89-16 effector
MLGLDLGIASVGWSIVEPGNRIIDLGVRVFKKAETDKEGDPLNLIRRESRLSRRRLYRRAHRLSRLLNFLISSGLIHSKDEVLKNVYNENPWALRTLGLNSVLTNNQLARVIYHICKHRGFYWASSADDGQADNGKIKKSLSSNQLVMKEKGYKTVGQMIFTEYPNCQRNKSGEYSKSLPRTDLDKELRAIFKAQQSFSNPIVTKDFINAIVGCGDRKTGFLWEQKPALQGEDLLKMVGHCRFEKDELRAPAANFYSEQLVWLTKINNLRVYDEDSQERPLTREERDLILNMPLEMKSDIKYSSLTSAFEKANLWKSGQFKYKSVDYEQKTQKKKNSAKSVDITKSSKKNPEDKVFYKSSHLHEIRKALGNSLSEEWEKIRTEVLSGKYDRYNRIAYVLTVYKEDSDVIKQLSPYESRTLIEALLPVRFSGFVALSEKSLKKIIPHMVLGKRYDEACSEANYKHYKQNQAESKKLKYLPSLFSGREPNGTLIFNEEIGDIPRNPVVLRVINQTRKVVNAIVKKYGSPKSVHIELARDLAKSRAERNEIEKRNEEAASRRIKERDEFEKLFGSKCLNGTNLLKYRLYKEQDCKSMYSGKEINHKRLFEKGYVQIDHILPYSRSYDDSQSNKVLVLTNENQDKGNRIPFEYFETKQQGFSWYEFEQWVKSCKNINQKKKRNLLRRSLSKDAKKDFLERNLNDTRYACRFVKNYIDSFLCLSENSDNSGCVVVAGQLTAYLRNCWGLNKVREENDRHHALDATVIACCTRKIVQKVGAWSKSREMNSYNSSYVDPDSPVDEDEKLLQKLYVNTRKPDFPKPWKCFRSEVESRVFESDLEKLKEKLKLQCSYTESELKNVRTLFVSRACEKIGKGALHGDTVYRQTSEMRKENVAVKKVSLKKLKYARIGAIVDADTRNKNLCDALKKRYEEYSSITGKDVSKIDKKDLSKIFSDDKPMHMPNSEGQEDPCNPIVKSVRVKEACSGVPIRNGVAENSTIVRVDIFKKKGQYYFVPIYSWNKSLPNRACQGKNKSDWVVVDDSYEWCFSVRTNDLLKIVIKGKTYFDYFITLDVHSDGRIRLLNHDRQEDDVHYENGEYRISLKNADSINKYNVDVLGNYYLAKPEKRLELA

SEQ ID NO: 499 - protein, 1127 aa, synthetic construct
  REGION 1..1127: note = MG89-17 effector
MSYVLGLDLGIASVGWSIVEPGKRIIDLGVRVFKKAETDKEGEPLNLIRRESRLSRRRLYRRAHRLNRLLNFLISSGLIHSKDEVLKNVYNENPWALRTLGLNSVLTNNQLARVIYHICKHRGFYWASSADDGEADKGKIKNSLSSNQKLMKEKCYKTVGQMIFSEYPNCQRNKSGEYSKSLPRTDLEIELREIFKAQQSFSNPIVTKDFISAILGSGDRKTGFLWEQRPALQGADLLKMVGHCRFEKDELRAPAANFYAEQLVWLTRINNLRVYDEDSQERPLTREERDLILNMPLEMKSDIKYSSLTSAFEKANLWKAGQFKYKSVDYEQKTQKKKKSAEPSDITKSSKKNPEDKVFYKSSHLHKIRKALGSSLSEEWEKIRTEVLSGKYERYNRIAYVLTVYKEDSDVIEQLSPYESRTLIEALLPVRFSGFVALSEKSLKKIIPHMFLGKRYDEACSEAHYKQNQSEGKKSKYLPHLFSGREPNGTLIFNEEIGDIPRNPVVLRVINQTRKVVNAIVKKYGSPESVHIELARDLAKSRAERNEIKKRNEEAASRRIKEREEFEKHYGAEKPNGTNLLKYRLYKEQDCKSMYSGKEIDHKRLFEKGYVQIDHILPYSRSYDDSQSNKVLVLTNENQDKGNRIPFEYFETKQQGFSWYEFEQWVKSCKNINQKKKRNLLRRTLSNDAKKDFLERNLNDTRYACRFVKNYIDRFLCLSENSDNSGCVVVAGQLTAYLRNCWGLNKVREENDRHHALDATVIACCTRKIVQKVGVWSKSREMNSYNSSYVDPDLPVDEDEMLLQKLYVNKRKPDFPKPWNCFRNEVESRVFESDLEKLKEELKQQCSYTESDLKNVRTLFVSRACEKIGKGALHGDTVYRQTSEMRKENVAVKKVSLKKLKYARIGAIVDADTRNKNLCDALKKRYEEYSSITGKDVSKIDKKDLSKIFSDDKPMHMPNSEGQEDPCNPIVKSVRVKEACSGVPIRNGVAENSTIVRVDIFKKKGQYYFVPIYSWNKSLPNRACQGKNKSDWVVVDDSYEWCFSVRTNDLLKIVIKGKTYFDYYITLDVHSDGRIRLLNHDRQEDDVHYEKGEFRILIKNADSINKYNVDVLGNYYLAKPEKRLELA

SEQ ID NO: 500 - protein, 1132 aa, synthetic construct
  REGION 1..1132: note = MG89-18 effector
MSMSYVLGLDLGIASVGWSIVEPGKRIIDLGVRVFKKAETDKEGDPLNLIRRESRLSRRRLYRRAHRLNRLLNFLISSGLIHSKDEVLKNVYNENPWALRTLGLNSVLTNNQLARVIYHICKHRGFYWASSADDGQADNGKIKKSLSSNQLIMKEKGYKTVGQMIFTEYPNCQRNKSGEYSKSLPRTDLDKELRAIFKAQQSFSNPIVTKDFINAIVGVGDRKTGFLWEQRPALQGEDLLKMVGHCRFEKDELRAPAANFYSEQLVWLTKINNLRVYDEDSQERPLTIEERNLILNMPLEMKSDIKYSSLTSAFEKASLWKAGQFKYKSVDYEQKTQKKKKTAKSADITKSSKKNPEDKVFYKSSHLHEIRKALGSSLSEEWEKIRTEVLSGKYDRYNRIAYVLTVYKEDSDVIEQLSPYESRTLIEALLPVRFNGFVSLSEKSLKKIIPYMVLGKRYDEACSEAGYKHYKQNQAKVKKSKYLPSLFSGREHNGTLIFNEEIGDIPRNPVVLRVINQTRKVVNAIVKKYGSPESVHIELARDLAKSRAERNEIEKRNEDAASRRIKEREEFKKHYGAEKTNGTNLLKYRLYKEQDCKSMYSCKTIDINRLFEEGYVQIDHILPYSRSYDDSQSNKVLVLTKENQDKGNRIPYEYFESKQTDISWYEFEQWVKSCKNLNQKKKRNLLRNSLSKDAKKDFLERNLNDTRYACRFMKNYIDRFLCLSENSDKSGCVVVAGQLTANLRNCWGLNKVREENDRHHALDATVIACCTRKIVQKVGAWSKAREVEFNNSSYDDPDLPIDENELLLLNTFKNVKEPKFTEPWHCFREEVEARVFECDLEKLKKELKQQCSYTESDLKNVRTLFVSRACEKIGKGALHKDTVYRQTSEMRKENLAIKKVSLKKLKYAKISSIVDADTRNKNLCDALRKRYEEYSSTTGKDVSKIEEKDLAKIFSDDKPMHMPNSEGQEDPCNPIVKSVRVKDACSGVPIRNGVAENDNIMRVDIFKKRGKYYCIPIYAWNKTLPNKACVARKNESDWVEIDDSYEWCFSVRTNDLIRIDGKKESFFGYFNGFHRSVASFSILFHDRQISKKYKKGEKEGIGVKTAYSLTKYNVDVLGYYYLAKPEKRLELA

SEQ ID NO: 501 - protein, 1127 aa, synthetic construct
  REGION 1..1127: note = MG89-19 effector
MSYVLGLDLGIASVGWTIVEPGKRIIDLGVRVFKKAETDKEGEPLNLIRRESRLSRRRLYRRAHRLNRLLNFLISSGLIHSKDEVLKNVYNENPWALRTLGLNSVLTNNQLARVIYHICKHRGFYWASSADDGEADKGKIKNSLSSNQKLMKEKCYKTVGQMIFSEYPNCQRNKSGEYSKSLPRTDLDIELREIFKAQQSFSNPIVTKDFISAILGSGDRKTGFLWEQRPALQGADLLKMVGHCRFEKDELRAPAANFYAEQLVWLTRINNLRVYDEDSQERPLTREERDLILNMPLEMKSDIKYSSLTSAFEKANLWKAGQFKYKSVDYEQKTQKKKKSAEPSDITKSSKKNPEDKVFYKSSHLHKIRKALGSSLSEEWEKIRTEVLSGKYERYNRIAYVLTVFKEDSDVIEQLSPYESRTLIEALLPVRFSGFVALSEKSLKKIIPHMFLGKRYDEACSEAHYKQNQSEGKKSKYLPHLFSGREPNGTLIFNEEIGDIPRNPVVLRVINQTRKVVNAIVKKYGSPESVHIELARDLAKSRAERNEIKKRNEEAASRRIKEREEFEKHYGAEKTNGTNLLKYRLYKEQDCKSMYSGKEIDHKRLFEKGYVQIDHILPYSRSYDDSQSNKVLVLTNENQNKGNRIPFEYFETKQQGFSWYEFEQWVKSCKNINQKKKRNLLRRSLSKDAKKDFLERNLNDTRYACRFVKNYIDRFLCLSENSDNSGCVVVAGQLTAYLRNCWGLNKVREENDRHHALDATVIACCTRKIVQKVGAWSKSREMNSYNSSYVDPDLPVDEDEMLLQKLYVNKRKPDFPKPWNCFRNEVESRVFESDLEKLKEELKQQCSYTESDLKNVRTLFVSRACEKIGKGALHGDTVYRQTSEMRKENVAVKKVSLKKLKYARIGAIVDADTRNKNLCDALKKRYEEYSSITGKDVSKIDKKDLSKIFSDDKPMHMPNSEGQEDPCNPIVKSVRVKEACSGVPIRNGVAENSTIVRVDIFKKKGQYYFVPIYSWNKSLPNRACQGKNKSDWVVVDDSYEWCFSVRTNDLLKIVIKGKTYFDYYITLDVHSDGRIRLLNHDRQEDDVHYENGEFRILIKNADSINKYNVDVLGNYYLAKPEKRLELA

SEQ ID NO: 502 - protein, 1130 aa, synthetic construct
  REGION 1..1130: note = MG89-20 effector
MSYVLGLDLGIASVGWSIVEPGKRIIDLGVRVFKKAETDKEGEPLNLIRRESRLSRRRLYRRAHRLNRLLNFLISSGLIHSKDEVLKNVYNENPWALRTLGLNSVLTNNQLARVIYHICKHRGFYWASSADDGEADKGKIKNSLSSNQKLMKEKCYKTVGQMIFSEYPNCQRNKSGEYSKSLPRTDLDIELREIFKAQQSFSNPIVTKDFISAILGSGDRKTGFLWEQRPALQGEDLLKMVGHCRFEKDELRAPAANFYAEQLVWLTRINNLRVYDENSQERPLTKEEHDLILNMPLEMKSDIKYSSLTSAFVKANLWKPGQFKYKSVDYEQKTQKKKKSAEPSDITKSSKKNPEDKVFYKCSHLHEIRKALGSSLSAEWDKIRTEVLAGKYERYNRIAYVLTVYKEDSDVIEHLSLYESRALIDALLTVRFKGFVALSEKALKKIIPYMVQGKRYDEACSESGYRHYKQNQNDVKKSKYLPPLFSGREPNGTLIFNEDLGDIPRNPVVLRVINQTRKVVNAIVKKYGSPESVHIELARDLAKSRAERNEIKKRNEEAASRRIKEREEFEKHYGAEKTNGTNLLKYRLYKEQDCKSMYSGKEIDHKRLFEKGYVQIDHILPYSRSYDDSQSNKVLVLTNENQDKGNRIPFEYFETKQQGFSWYEFEQWVKSCKNINQKKKRNLLRRSLSKDAKKDFLERNLNDTRYACRFVKNYIDRFLCLSENSDNSGCVVVAGQLTAYLRNCWGLNKVREENDRHHALDATVIACCTRKIVQKVGAWSKSREMNSYNSSYVDPDLPVDEDEMLLQKLYVNKRKTDFPKPWNCFRNEVESRVFESDLEKLKEELKQQCSYTESDLKNVRTLFVSRACEKIGKGALHGDTVYRQTSEMRKENVAVKKVSLKKLKYARIGAIVDADTRNKNLCDALKKRYEEYSSITGKDVSKIDKKDLSKIFSDDKPMHMPNSEGQEDPCNPIVKSVRVKEACSGVPIRNGVAENSTIVRVDIFKKKGQYYFVPIYSWNKSLPNRACQGKNKSDWVVVDDSYEWCFSVRTNDLLKIVIKGKTYFDYYITLDVHSDGRIRLLNHDRQEDDVHYEKGEFRILIKNADSINKYNVDVLGNYYLAKPEKRLELA

SEQ ID NO: 503 - protein, 1130 aa, synthetic construct
  REGION 1..1130: note = MG89-21 effector
MSYVLGLDLGIASVGWSIVEPGNRIIDLGVRVFKKAETDKEGDPLNLIRRESRLSRRRLYRRAHRLSRLLNFLISSGLIHSKDEVLKNVYNENPWELRTLGLNSVLTNNQLARVIYHICKHRGFYWASSADDGQADSGKIKKSLSSNQLVMKEKGYKTVGQMIFTEYPNCQRNKSGEYSKSLPRTDLDKELRAIFKAQQSFSNPIVTKDFINAIVGCGDRKTGFLWEQRPALQGEDLLKMVGHCRFEKDELRAPAANFYSEQLVWLTKINNLRVYDEDSQERPLTREERDLILNMPLEMKSDIKYSSLTSAFEKASLWKAGQFKYKSVDYEQKTQKKKKTAKSADITKSSKKNPEDKVFYKSSHLHEIRKALGSSLSEEWEKIRTEVLSGKYDRYNRIAYVLTVYKEDSDVIEQLSPYESRTLIEALLPVRFNGFVSLSEKSLKKIIPYMVLGKRYDEACSEAGYKHYKQNQAKVKKSKYLPSLFSGREPNGTLIFNEEIGDIPRNPVVLRVINQTRKVVNAIVKKYGSPESVHIELARDLAKSRAERNEIEKRNEDAASRRIKEREEFKKHYGAEKTNGTNLLKYRLYKEQDCKSMYSCKTIDINRLFEEGYVQIDHILPYSRSYDDSQSNKVLVLTKENQDKGNRIPYEYFESKQTDISWYEFEQWVKSCKNLNQKKKRNLLRNSLSKDAKKDFLERNLNDTRYACRFMKNYIDRFLCLSENSDKSGCVVVAGQLTANLRNCWGLNKVREENDRHHALDATVIACCTRKIVQKVGAWSKAREVEFNNSSYDDPDLPIDENELLLLNTFKNVKEPKFTEPWHCFREEVEARVFECDLEKLKKELKQQCSYTESDLKNVRTLFVSRACEKIGKGALHKDTVYRQTSEMRKENLAIKKVSLKKLKYAKISSIVDADTRNKNLCDALRKRYEEYSSTTGKDVSKIEEKDLAKIFSDDKPMHMPNSEGQEDPCNPIVKSVRVKDACSGVPIRNGVAENDNIMRVDIFKKRGKYYCIPIYAWNKTLPNKACVARKNESDWVEIDDSYEWCFSVRTNDLIRIDGKKESFFGYFNGFHRSVASFSILFHDRQISKKYKKGEKEGIGVKTAYSLTKYNVDVLGYYYLAKPEKRLELA

SEQ ID NO: 504 - protein, 1126 aa, synthetic construct
  REGION 1..1126: note = MG89-22 effector
MLGLDLGIASVGWSIVEPGNRIIDLGVRVFKKAETDKEGDPLNLIRRESRLSRRRLYRRAHRLSRLLNFLISSGLIHSKDEVLKNVYNENPWALRTLGLNSVLTNNQLARVIYHICKHRGFYWASSADDGQADNGKIKKSLSSNQLVMKEKGYKTVGQMIFTEYPNCQRNKSGEYSKSLPRTDLDKELRAIFKAQQSFSNPIVTKDFINAIVGCGDRKTGFLWEQRPALQGEDLLKMVGHCRFEKDELRAPAANFYSEQLVWLTKINNLRVYDEDSQERPLTREERDLILNMPLEMKSDIKYSSLTSAFEKANLWKSGQFKYKSVDYEQKTQKKKNTAKSVDITKSSKKNPEDKVFYKSSHLHEIRKALGSSLSEEWEKIRTEVLSGKYDRYNRIAYVLTVYKEDSDVIEQLSPYESRTLIEALLPVRFSGFVALSEKSLKKIIPHMVLGKRYDEACSEANYKHYKQNQAEFKKLKYLPPLFSGREPNGTLIFNEEIGDIPRNPVVLRVINQTRKVVNAIVKKYGSPKSVHIELARDLAKSRAERNEIEKRNEEAASRHIKERDEFEKLFGSKCLNGTNLLKYRLYKEQDCKSMYSSKEIDHKRLFEKGYVQIDHILPYSRSYDDSQSNKVLVLTNENQDKGNRIPFEYFEAKQHGFSWYEFEQWVKSCKNLNQKKKRNLLRCSLSKDAKKDFLERNLNDTRYACRFVKNYIDSFLCLSENSDNSGCVVVAGQLTAYLRNCWGLNKVREENDRHHALDATVIACCTRKIVQKVGAWSKSREMNSYNSSYVDPDSPVDEDEKLLQKLYVNTRKPDFPKPWECFRSEVESRVFESALEKLKEKLKLQCSYTESELKNVRTLFVSRACEKIGKGALHGDTVYRQTSEMRKENVAVKKVSLKKLKYARIEAIVDADTRNKNLCDALKKRYEEYARKIGKKIEDFVDKDIAKIFADDNPLHMPNSDGQEDPCNPIVKSVRVKEAFSGVPIRNGVAGNSTIIRVDLFKKDGKYYCIPVYAWNKTLPNRAYVSGKKETDWALVDDSFEWCFSIRQNELLKIKLKGETIFGYYNGFDRDRGSFNILLHDRQDGKDHKQGLIRKGIKTAISITKYDVDVLGNYYLSKPEKRLELA

SEQ ID NO: 505 - protein, 1127 aa, synthetic construct
  REGION 1..1127: note = MG89-23 effector
MSYVLGLDLGIASVGWSIVEPGKRIIDLGVRVFKKAETDKEGEPLNLIRRESRLSRRRLYRRAHRLNRLLNFLISSGLIHSKDEVLKNVYNENPWALRTLGLNSVLTNNQLARVIYHICKHRGFYWASSADDGEADKGKIKNSLSSNQKLMKEKCYKTVGQMIFSEYPNCQRNKSGEYSKSLPRTDLDLELREIFKAQQSFSNPIVTKDFISAILGSGDRKTGFLWEQRPALQGADLLKMVGHCRFEKDELRAPAANFYAEQLVWLTRINNLRVYDEDSQERPLTREERDLILNMPLEMKSDIKYSSLTSAFEKANLWKAGQFKYKSVDYEQKTQKKKKSAEPSDITKSSKKNPEDKVFYKSSHLHKIRKALGSSLSEEWEKIRTEVLSGKYERYNRIAYVLTVYKEDSDVIEQLSPYESRTLIEALLPVRFSGFVALSEKSLKKIIPHMFLGKRYDEACSEAHYKQNQSEGKKSKYLPHLFSGREPNGTLIFNEEIGDIPRNPVVLRVINQTRKVVNAIVKKYGSPESVHIELARDLAKSRAERNEIKKRNEEAASRRIKEREEFEKHYGAEKPNGTNLLKYRLYKEQDCKSMYSGKEIDHKRLFEKGYVQIDHILPYSRSYDDSQSNKVLVLTNENQDKGNRIPFEYFETKQQGFSWYEFEQWVKSCKNINQKKKRNLLRRTLSNDAKKDFLERNLNDTRYACRFVKNYIDRFLCLSENSDNSGCVVVAGQLTAYLRNCWGLNKVREENDRHHALDATVIACCTRKIVQKVGVWSKSREMNSYNSSYVDPDLPVDEDEMLLQKLYVNKRKPDFPKPWNCFRNEVESRVFESDLEKLKEELKQQCSYTESDLKNVRTLFVSRACEKIGKGALHGDTVYRQTSEMRKENVAVKKVSLKKLKYARIGAIVDADTRNKNLCDALKKRYEEYSSITGKDVSKIDKKDLSKIFSDDKPMHMPNSEGQEDPCNPIVKSVRVKEACSGVPIRNGVAENSTIVRVDIFKKKGQYYFVPIYSWNKSLPNRACQGKNKSDWVVVDDSYEWCFSVRTNDLLKIVIKGKTYFDYYITLDVHSDGRIRLLNHDRQEDDVHYEKGEFRILIKNADSINKYNVDVLGNYYLAKPEKRLELA

SEQ ID NO: 506 - protein, 1130 aa, synthetic construct
  REGION 1..1130: note = MG89-24 effector
MSYVLGLDLGIASVGWSIVEPGKRIIDLGVRVFKKAETDKEGEPLNLIRRESRLSRRCLYRRAHRLNRLLNFLISSGLIHSKDEVLKNVYNENPWALRTLGLNSVLTNNQLARVIYHICKHRGFYWASSADDGEADKGKIKNSLSSNQKLMKEKCYKTVGQMIFSEYPNCQRNKSGEYSKSLPRTDLDIELREIFKAQQSFSNPIVTKDFISAILGSGDRKTGFLWEQRPALQGEDLLKMVGHCRFEKDELRAPAANFYAEQLVWLTRINNLRVYDENSQERPLTKEEHDLILNMPLEMKSDIKYSSLTSAFVKANLWKPGQFKYKSVDYEQKTQKKKKSAEPSDITKSSKKNPEDKVFYKCSHLHEIRKVLGSSLSAEWDKIRTEVLAGKYERYNRIAYVLTVYKEDSDVIEHLSLYESRALIDALLTVRFKGFVALSEKALKKIIPYMVQGKRYDEACSESGYKHYKQNQNDVKKSKYLPPLFSGREPNGTLIFNEDLGDIPRNPVVLRVINQTRKVVNAIVKKYGSPESVHIELARDLAKSRAERNEIKKRNEEAASRRIKEREEFEKHYGAEKTNGTNLLKYRLYKEQDCKSMYSGKEIDHKRLFEKGYVQIDHILPYSRSYDDSQSNKVLVLTNENQNKGNRIPFEYFETKQQGFSWYEFEQWVKSCKNINQKKKRNLLRRSLSKDAKKDFLERNLNDTRYACRFVKNYIDRFLCLSENSDNSGCVVVAGQLTAYLRNCWGLNKVREENDRHHALDATVIACCTRKIVQKVGAWSKSREMNSYNSSYVDPDLPVDEDEMLLQKLYVNKRKPDFPKPWNCFRNEVESRVFESDLEKLKEELKQQCSYTESDLKNVRTLFVSRACEKIGKGALHGDTVYRQTSEMRKENVAVKKVSLKKLKYARIGAIVDADTRNKNLCDALKKRYEEYSSITGKDVSKIDKKDLSKIFSDDKPMHMPNSEGQEDPCNPIVKSVRVKEACSGVPIRNGVAENSTIVRVDIFKKKGQYYFVPIYSWNKSLPNRACQGKNKSDWVVVDDSYEWCFSVRTNDLLKIVIKGKTYFDYYITLDVHSDGRIRLLNHDRQEDDVHYENGEFRILIKNADSINKYNVDVLGNYYLAKPEKRLELA

SEQ ID NO: 507 - protein, 1132 aa, synthetic construct
  REGION 1..1132: note = MG89-25 effector
MNMSYVLGLDLGIASVGWSIVEPGKRIIDLGVRVFKKAETDKEGDPLNLIRRESRLSRRRLYRRAHRLNRLLNFLISSGLIHSKDEVLKNVYNENPWALRTLGLNSVLTNNQLARVIYHICKHRGFYWASSADDGQADNGKIKKSLSSNQLIMKEKGYKTVGQMIFTEYPNCQRNKSGEYSKSLPRTDLDKELRAIFKAQQSFSNPIVTKDFINAIVGIGDRKTGFLWEQRPALQGEDLLKMVGHCRFEKDELRAPAANFYSEQLVWLTKINNLRVYDEDSQERPLTREERNLILNMPLEMKSDIKYSSLTSAFEKASLWKAGQFKYKSVDYEQKTQKKKKTAKSADITKSSKKNPEDKVFYKSSHLHEIRKALGSSLSEEWEKIRTEVLSGKYDRYNRIAYVLTVYKEDSDVIEQLSPYESRTLIEALLPVRFNGFVSLSEKSLKKIIPYMVLGKRYDEACSEAGYKHYKQNQAKVKKSKYLPSLFSGREPNGTLIFNEEIGDIPRNPVVLRVINQTRKVVNAIVKKYGSPESVHIELARDLAKSRAERNEIEKRNEDAASRRIKEREEFKKHYGAEKTNGTNLLKYRLYKEQDCKSMYSCKTIDINRLFEEGYVQIDHILPYSRSYDDSQSNKVLVLTKENQDKGNRIPYEYFESKQIDISWYEFEQWVKSCKNLNQKKKRNLLRNSLSKDAKKDFLERNLNDTRYACRFMKNYIDRFLCLSENSDKSGCVVVAGQLTANLRNCWGLNKVREENDRHHALDATVIACCTRKIVQKVGAWSKAREVEFNNSSYDDPDLPIDENELLLLNTFKNVKEPKFTEPWHCFREEVEARVFECDLEKLKKELKQQCSYTESDLKNVRTLFVSRACEKIGKGALHKDTVYRQTSEMRKENLAIKKVSLKKLKYAKISSIVDADTRNKNLCDALRKRYEEYSSTTGKDVSKIEEKDLAKIFSDDKPMHMPNSEGQEDPCNPIVKSVRVKDACSGVPIRNGVAENDNIMRVDIFKKRGKYYCIPIYAWNKTLPNKACVARKNESDWVEIDDSYEWCFSVRTNDLIRIDGKKESFFGYFNGFHRSVASFSILFHDRQISKKYKKGEKEGIGVKTAYSLTKYNVDVLGYYYLAKPEKRLELA

SEQ ID NO: 508 - protein, 1130 aa, synthetic construct
  REGION 1..1130: note = MG89-26 effector
MSYVLGLDLGIASVGWSIVEPGKRIIDLGVRVFKKAETDKEGAPLNLIRRESRLSRRRLYRRAHRLNRLLNFLISSGLIHSKDEVLKNVYNENPWALRTLGLNSVLTNNQLARVIYHICKHRGFYWASSADDGEADKGKIKNSLSSNQKLMKEKCYKTVGQMIFSEYPNCQRNKSGEYSKSLPRTDLDIELREIFKAQQSFSNPIVTKDFISAILGSGDRKTGFIWEQRPALQGEDLLKMVGHCRFEKDELRAPAANFYAEQLVWLTRINNLRVYDENSQERPLTKEEHDLILNMPLEMKSDIKYSSLTSAFVKANLWKPGQFKYKSVDYEQKTQKKKKSAEPSDITKSSKKNPEDKVFYKCSHLHEIRKALGSSLSAEWDKIRTEVLAGKYERYNRIAYVLTVYKEDSDVIEHLSLYESRALIDALLTVRFKGFVALSEKALKKIIPYMVQGKRYDEACSESGYKHYKQNQNDVKKSKYLPPLFSGREPNGTLIFNEDLGDIPRNPVVLRVINQTRKVINAIVKKYGSPESVHIELARDLAKSRAERNEIKKRNEEAASRRIKEREEFEKHYGAEKTNGTNLLKYRLYKEQDSKSMYSGKEIDHKRLFEKGYVQIDHILPYSRSYDDSQSNKVLVLTNENQDKGNRIPFEYFETKQQGFSWYEFEQWVKSCKNINQKKKRNLLRRSLSKDAKKDFLERNLNDTRYACRFVKNYIDRFLCLSENSDNSGCVVVAGQLTAYLRNCWGLNKVREENDRHHALDATVIACCTRKIVQKVGAWSKSREMNSYNSSYVDPDLPVDEDEMLLQKLYVNKRKPDFPKPWNCFRNEVESRVFESDLEKLKEELKQQCSYTESDLKNVRTLFVSRACEKIGKGALHGDTVYRQTSEMRKENVAVKKVSLKKLKYARIGAIVDADTRNKNLCDALKKRYEEYSSITGKDVSKIDKKDLSKIFSDDKPMHMPNSEGQEDPCNPIVKSVRVKEACSGVPIRNGVAENSTIVRVDIFKKKGQYYFVPIYSWNKSLPNRACQGKNKSDWVVVDDSYEWCFSVRTNDLLKIVIKGKTYFDYYITLDVHSDGRIRLLNHDRQEDDVHYEKGEFRILIKNADSINKYNVDVLGNYYLAKPEKRLELA

SEQ ID NO: 509 - protein, 1126 aa, synthetic construct
  REGION 1..1126: note = MG89-27 effector
MLGLDLGIASVGWSIVEPGNRIIDLGVRVFKKAETDKEGDPLNLIRRESRLSRRRLYRRAHRLSRLLNFLISSGLIHSKDEVLKNVYNENPWALRTLGLNSVLTNNQLARVIYHICKHRGFYWASSADDGQADNGKIKKSLSSNQLVMKEKGYKTVGQMIFTEYPNCQRNKSGEYSKSLPRTDLDKELRAIFKAQQSFSNPIVTKDFINAIVGCGDRKTGFLWEQRPALQGEDLLKMVGHCRFEKDELRAPAANFYSEQLVWLTKINNLRVYDEDSQERPLTREERDLILNMPLEMKSDIKYSSLTSAFEKANLWKSGQFKYKSVDYEQKTQKKKNTAKSVDITKSSKKNPEDKVFYKSSHLHEIRKALGSSLSEEWEKIRTEVLSGKYDRYNRIAYVLTVYKEDSDVIEQLSPYESRTLIEALLPVRFSGFVALSEKSLKKIIPHMVLGKRYDEACSEANYKHYKQNQAEFKKLKYLPPLFSGREPNGTLIFNEEIGDIPRNPVVLRVINQTRKVVNAIVKKYGSPKSVHIELARDLAKSRAERNEIEKRNEEAASRHIKERDEFEKLFGSNCLNGTNLLKYRLYKEQDCKSMYSGKEIDHKRLFEKGYVQIDHILPYSRSYDDSQSNKVLVLTNENQDKGNRIPFEYFEAKQHGFSWYEFEQWVKSCKNLNQKKKRNLLRCSLSKDAKKDFLERNLNDTRYACRFVKNYIDSFLCLSENSDNSGCVVVAGQLTAYLRNCWGLNKVREENDRHHALDATVIACCTRKIVQKVGAWSKSREMNSYNSSYVDPDSPVDEDEKLLQKLYVNTRKPDFPKPWECFRSEVESRVFESALEKLKEKLKLQCSYTESELKNVRTLFVSRACEKIGKGALHGDTVYRQTSEMRKENVAVKKVSLKKLKYARIGAIVDADTRNKNLCDALKKRYEEYARKIGKKIEDFVDKDIAKIFADDNPLHMPNSDGQEDPCNPIVKSVRVKEAFSGVPIRNGVAGNSTIIRVDLFKKDGKYYCIPVYAWNKTLPNRAYVSGKKETDWALVDDSFEWCFSIRQNELLKIKLKGETIFGYYNGFDRDRGSFNILLHDRQDGKDHKQGLIRKGIKTAISITKYDVDVLGNYYLSKPEKRLELA

SEQ ID NO: 510 - protein, 1131 aa, synthetic construct
  REGION 1..1131: note = MG89-28 effector
MNMSYVLGLDLGIASVGWSIVEPGNRIIDLGVRVFKKAETDKEGDPLNLIRRESRLSRRRLYRKAHRLSRLLNFLISSGLIHSKDEVLKNVYNENPWALRTLGLNSVLTNNQLARVIYHICKHRGFYWASSADDGQADNGKIKKSLSSNQLVMKEKGYKTVGQMIFTEYPNCQRNKSGEYSKSLPRTDLDKELRAIFKAQQSFSNPIVTKDFINAIVGCGDRKTGFLWEQRPALQGEDLLKMVGHCRFEKDELRAPAANFYSEQLVWLTKINNLRVYDEDSQERPLTREERDLILNMPLEMKSDIKYSSLTSAFEKANLWKSGQFKYKSVDYEQKTQKKKNTAKSVDITKSSKKNPEDKVFYKSSHLHEIRKALGSSLSEEWEKIRTEVLSGKYDRYNRIAYVLTVYKEDSDVIEQLSPYESRTLIEALLPVRFSGFVALSEKSLKKIIPHMVLGKRYDEACSEANYKHYKQNQAEFKKLKYLPPLFSGREPNGTLIFNEEIGDIPRNPVVLRVINQTRKVVNAIVKKYGSPKSVHIELARDLAKSRAERNEIKKRNEEAASSRIKERDEFEKLFGSKCLNGTNLLKYRLYKEQDCKSMYSGKEIDHKRLFEKGYVQIDHILPYSRSYDDSQSNKVLVLTNENQDKGNRIPFEYFEAKQHGFSWYEFEQWVKSCKNLNQKKKRNLLRCSLSKDAKKDFLERNLNDTRYACRFVKNYIDSFLCLSENSDNSGCVVVAGQLTAYLRNCWGLNKVREENYRHHALDATVIACCTRKIVQKVGAWSKSREMNSYNSSYVDPDSPVDEDEKLLQKLYVNTRKPDFPKPWECFRSEVESRVFESALEKLKEKLKLQCSYTESELKNVRTLFVSRACEKIGKGALHGDTVYRQTSEMRKENVAVKKVSLKKLKYARIGAIVDADTRNKNLCDALKKRYEEYARKIGKKIEDFVDKDIAKIFADDNPLHMPNSDGQEDPCNPIVKSVRVKEAFSGVPIRNGVAGNSTIIRVDLFKKDGKYYCIPVYAWNKTLPNRAYVSGKKETDWALVDDSFEWCFSIRQNELLKIKLKGETIFGYYNGFDRDRGSFNILLHDRQDGKDHKQGLIRKGIKTAISITKYDVDVLGNYYLSKPEKRLELA

SEQ ID NO: 511 - protein, 1130 aa, synthetic construct
  REGION 1..1130: note = MG89-29 effector
MSYVLGLDLGIASVGWSIVEPGKRIIDLGVRVFKKAETDKEGEPLNLIRRESRLSRRRLYRRSHRLNRLLNFLISSGLIHSKDEVLKNVYNENPWALRTLGLNSVLTNNQLARVIYHICKHRGFYWASSADDGEADKGKIKNSLSSNQKLMKEKCYKTVGQMIFSEYPNCQRNKSGEYSKSLPRTDLDIELREIFKAQQSFSNPIVTKDFISAILGSGDRKTGFLWEQRPALQGEDLLKMVGHCRFEKDELRAPAANFYAEQLVWLTRINNLRVYDENSQERPLTKEEHDLILNMPLEMKSDIKYSSLTSAFVKANLWKPGQFKYKSVDYEQKTQKKKKSAEPSDITKSSKKNPEDKVFYKCSHLHEIRKALGSSLSAEWDKIRTEVLAGKYERYNRIAYVLTVYKEDSDVIEHLSLYESRALIDALLTVRFKEFVALSEKALKKIIPYMVQGKRYDEACSESGYKHYKQNQNDVKKSKYLPPLFSGREPNGTLIFNEDLGDIPRNPVVLRVINQTRKVVNAIVKKYGSPESVHIELARDLAKSRAERNEIKKRNEEAALRRIKEREEFEKHYGAEKPNGTNLLKYRLYKEQDCKSMYSGKEIDHKRLFEKGYVQIDHILPYSRSYDDSQSNKVLVLTNENQDKGNRIPFEYFETKQQGFSWYEFEQWVKSCKNINQKKKRNLLRRTLSNDAKKDFLERNLNDTRYACRFVKNYIDRFLCLSENSDNSGCVVVAGQLTAYLRNCWGLNKVREENDRHHALDATVIACCTRKIVQKVGVWSKSREMNSYNSSYVDPDLPVDEDEMLLQKLYVNKRKPDFPKPWNCFRNEVESRVFESDLEKLKEELKQQCSYTESDLKNVRTLFVSRACEKIGKGALHGDTVYRQTSEMRKENVAVKKVSLKKLKYARIGAIVDADTRNKNLCDALKKRYEEYSSITGKDVSKIDKKDLSKIFSDDKPMHMPNSEGQEDPCNPIVKSVRVKEACSGVPIRNGVAENSTIVRVDIFKKKGQYYFVPIYSWNKSLPNRACQGKNKSDWVVVDDSYEWCFSVRTNDLLKIVIKGKTYFDYYITLDVHSDGRIRLLNHDRQEDDVHYEKGEFRILIKNADSINKYNVDVLGNYYLAKPEKRLELA

SEQ ID NO: 512 - protein, 1130 aa, synthetic construct
  REGION 1..1130: note = MG89-30 effector
MSYVLGLDLGIASVGWSIVEPGKRIIDLGVRVFKKAETDKEGEPLNLIRRESRLSRRRLYRRAHRLNRLLNFLISSGLIHSKDEVLKNVYNENPWALRTLGLNSVLTNNQLARVIYHICKHRGFYWASSADDGEADKGKIKNSLSSNQKLMKEKCYKTVGQMIFSEYPNCQRNKSGEYSKSLPRTDLDIELREIFKAQQSFSNPIVTKDFISAILGSGDRKTGFLWEQRPALQGEDLLKMVGHCRFEKDELRAPAANFYAEQLVWLTRINNLRVYDENSQERPLTKEEHDLILNMPLEMKSDIKYSSLTSAFVKANLWKPGQFKYKSVDYEQKTQKKKKSAEPSDITKSSKKNPEDKVFYKCSHLHEIRKVLGSSLSAEWDKIRTEVLAGKYERYNRIAYVLTVYKEDSDVIEHLSLYESRALIDALLTVRFKGFVALSEKALKKIIPYMVQGKRYDEACSESGYKHYKQNQNDVKKSKYLPPLFSGREPNGTLIFNEDLGDIPRNPVVLRVINQTRKVVNAIVKKYGSPESVHIELARDLAKSRAERNEIKKRNEEAASRRIKEREEFEKHYGAEKTNGTNLLKYRLYKEQDCKSMYSGKEIDHKRLFEKGYVQIDHILPYSRSYDDSQSNKVLVLTNENQNKGNRIPFEYFETKQQGFSWYEFEQWVKSCKNINQKKKRNLLRRSLSKDAKKDFLERNLNDTRYACRFVKNYIDRFLCLSENSDNSGCVVVAGQLTAYLRNCWGLNKVREENDRHHALDATVIACCTRKIVQKVGAWSKSREMNSYNSSYVDPDLPVDEDEMLLQKLYVNKRKPDFPKPWNCFRNEVESRGFESDLEKLKEELKQQCSYTESDLKNVRTLFVSRACEKIGKGALHGDTVYRQTSEMRKENVAVKKVSLKKLKYARIGAIVDADTRNKNLCDALKKRYEEYSSITGKDVSKIDKKDLSKIFSDDKPMHMPNSEGQEDPCNPIVKSVRVKEACSGVPIRNGVAENSTIVRVDIFKKKGQYYFVPIYSWNKSLPNRACQGKNKSDWVVVDDSYEWCFSVRTNDLLKIVIKGKTYFDYYITLDVHSDGRIRLLNHDRQEDDVHYENGEFRILIKNADSINKYNVDVLGNYYLAKPEKRLELA

SEQ ID NO: 513 - protein, 1127 aa, synthetic construct
  REGION 1..1127: note = MG89-31 effector
MLGLDLGIASVGWSIVEPGNRIIDLGVRVFKKAETDKEGDPLNLIRRESRLSRRRLYRRAHRLSRLLNFLISSGLIHSKDEVLKNVYNENPWELRTLGLNSVLTNNQLARVIYHICKHRGFYWASSADDGQADSGKIKKSLSSNQLVMKEKGYKTVGQMIFTEYPNCQRNKSGEYSKSLPRTDLDKELRAIFKAQQSFSNPIVTKDFINAIVGCGDRKTGFLWEQRPALQGEDLLKMVGHCRFEKDELRAPAANFYSEQLVWLTKINNLRVYDEDSQERPLTREERDLILNMPLEMKSDIKYSSLTSAFEKANLWKSGQFKYKSVDYEQKIQKKKNTAKSVDITKSSKKNPEDKVFYKSSHLHEIRKALGSSLSEEWEKIRTEVLSGKYVRYNRIAYVLTVYKEDSDVIEQLSPYESRTLIEALLPVRFSGFVALSEKSLKKIIPHMVLGKRYDEACSEANYKHYKQNQAESKKLKYLPPLFSGREPNGTLIFNEEIGDIPRNPVVLRVINQTRKVVNAIVKKYGSPESVHIELARDLAKSRAERNEIKKRNEEAASRRIKEREEFEKHYGAEKPNGTNLLKYRLYKEQDCKSMYSGKEIDYKRLFEKGYVQIDHILPYSRSYDDSQSNKVLVLTNENQDKGNRIPFEYFETKQQGFSWYEFEQWVKSCKNINQKKKRNLLRRSLSNDAKKDFLERNLNDTRYACRFVKNYIDRFLCLSENSDNSGCVVVAGQLTAYLRNCWGLNKVREENDRHHALDATVIACCTRKIVQKVGVWSKSREMNSYNSSYVDPDLPVDEDEMLLQKLYVNKRKPDFPKPWNCFRNEVESRVFESDLEKLKEELKQQCSYTESDLKNVRTLFVSRACEKIGKGALHGDTVYRQTSEMRKENVAVKKVSLKKLKYARIGAIVDADTRNKNLCDALKKRYEEYSSSTGKDVSKIDKKDLSKIFSDDKPMHMPNSEGQEDPCNPIVKSVRVKEACSGVPIRNGVAENSTIVRVDIFKKKGQYYFVPIYSWNKSLPNRACQGKNKSDWVVVDDSYEWCFSVRTNDLLKIVIKGKTYFDYYITLDVHSDGRIRLLNHDRQEDDVHYEKGEFRILIKNADSINKYNVDVLGNYYLAKPEKRLELA

SEQ ID NO: 514 - protein, 1129 aa, synthetic construct
  REGION 1..1129: note = MG89-32 effector
MSYVLGLDLGIASVGWSIVEPGNRIIDLGVRVFKKAETDKEGDQLNLIRRESRLSRRRLYRRAHRLSRLLNFLISSGLIHSKDEVLKNVYNENPWALRTLGLNSVLTNNQLARVIYHICKHRGFYWASSADDGQADNGKIKKSLSSNQLVMKEKGYKTVGQMIFTEYPNCQRNKSGEYSKSLPRTDLDKELRAIFKAQQSFSNPIVTKDFINAIVGCGDRKTGFLWEQRPALQGEDLLKMVGHCRFEKDELRAPAANFYSEQLVWLTKINNLRVYDEDSQERPLTREERDLILNMPLEMKSDIKYSSLTSAFEKANLWKSGQFKYKSVDYEQKTQKKKNTAKSVDITKSSKKNPEDKVFYKSSHLHEIRKALGSSLSEEWEKIRTEVLSGKYDRYNRIAYVLTVYKEDSDVIEQLSPYESRTLIEALLPVRFSGFVALSEKSLKKIIPHMVLGKRYDEACSEANYKHYKQNQAESKKLKYLPPLFSGREPNGTLIFNEEIGDIPRNPVVLRVINQTRKVVNAIVKKYGSPKSVHIELARDLAKSRAERNEIEKRNEEAASRRIKERDEFEKLFGSKCLNGTNLLKYRLYKEQDCKSMYSRKTIDIKRLFEKGYVQIDHILPYSRSYDDSQSNKVIVLTKENQDKGNQIPYEYFETRQANISWFEFERWVKSCKNLNQKKKSNLLRRSLSKDAKKDFLERNLNDTRYACRFVKNYIDSFLCLSENSDNSGCVVVAGQLTAYLRNCWGLNKVREENDRHHALDATVIACCTRKIVQKVGSWSKSREMNSYNSSYVDPDSPVDEDEKLLQKLYVNTRKPDFPKPWECFRSEVESRVFESDLEKLKEKLKLQCSYTESELKNVRTLFVSRACEKIGKGALHGDTVYRQTSEMRKENVAVKKVSLKKLKYARIGAIVDADTRNKNLCDVLKKRYEDYARKIGKKIEDFVDKDIAKIFADDNQLHMPNSDGQEDPCNPIVKSVRVKEAFSGVPIRNGVAGNSTIIRVDLFKKDGKYYCIPVYAWNKTLPNRAYVSGKKETDWALVDDSFEWCFSIRQNELLKIKLKGETIFGYYNGFDRDRGSFNILLHDRQDGKDHKQGLIRKGIKTAISITKYDVDVLGNYYLSKPEKRLELA

SEQ ID NO: 515 - protein, 1130 aa, synthetic construct
  REGION 1..1130: note = MG89-33 effector
MSYVLGLDLGIASVGWSIVEPGKRIIDLGVRVFKKAETDKEGEPLNLIRRESRLSRRRLYRRSHRLNRLLNFLISSGLIHSKDEVLKNVYNENPWALRTLGLNSVLTNNQLARVIYHICKHRGFYWASSADDGEADKGKIKNSLSSNQKLMKEKCYKTVGQMIFSEYPNCQRNKSGEYSKSLPRTDLDIELREIFKAQQSFSNPIVTKDFISAILGSGDRKTGFLWEQRPALQGEDLLKMVGHCRFEKDELRAPAANFYAEQLVWLTRINNLRVYDENSQERPLTKGEHDLILNMPLEMKSDIKYSSLTSAFVKANLWKPGQFKYKSVDYEQKTQKKKKSAEPSDITKSSKKNPEDKVFYKCSHLHEIRKALGSSLSAEWDKIRTEVLAGKYERYNRIAYVLTVYKEDSDVIEHLSLYESRALIDALLTVRFKEFVALSEKALKKIIPYMVQGKRYDEACSESGYKHYKQNQNDVKKSKYLPPLFSGREPNGTLIFNEDLGDIPRNPVVLRVINQTRKVVNAIVKKYGSPESVHIELARDLAKSRAERNEIKKRNEEVASRRIKEREEFEKHYGAEKTNGTNLLKYRLYKEQDCKSMYSGKEIDHKRLFEKGYVQIDHILPYSRSYDDSQSNKVLVLTNENQDKGNRIPFEYFETKQQGFSWYEFEQWVKSCKNINQKKKRNLLRRSLSKDAKKDFLERNLNDTRYACRFVKNYIDRFLCLSENSDNSGCVVVAGQLTAYLRNCWGLNKVREENDRHHALDATVIACCTRKIVQKVGAWSKSREMNSYNSSYVDPDLPVDEDEMLLQKLYVNKRKPDFPKPWNCFRNEVESRVFESDLEKLKEELKQQCSYTESDLKNVRTLFVSRACEKIGKGALHGDTVYRQTSEMRKENVAVKKVSLKKLKYARIGAIVDADTRNKNLCDALKKRYEEYSSITGKDVSKIDKKDLSKIFSDDKPMHMPNSEGQEDPCNPIVKSVSVKEACSGVPIRNGVAENSTIVRVDIFKKKGQYYFVPIYSWNKSLPNRACQGKNKSDWVVVDDSYEWCFSVRTNDLLKIVIKGKTYFDYYITLDVHSDGRIRLLNHDRQEDDVHYEKGEFRILIKNADSINKYNVDVLGNYYLAKPEKRLELA

SEQ ID NO: 516 - protein, 887 aa, synthetic construct
  REGION 1..887: note = MG89-34 effector
MSYVLGLDLGIASVGWSIVEPGKRIIDLGVRVFKKAETDKEGEPLNLIRRESRLSRRRLYRRSHRLNRLLNFLISSGLIHSKDEVLKNVYNENPWALRTLGLNSVLTNNQLARVIYHICKHRGFYWASSADDGEADKGKIKNSLSSNQKLMKEKCYKTVGQMIFSEYPNCQRNKSGEYSKSLPRTDLDIELREIFKAQQSFSNPIVTKDFISAILGSGDRKTGFLWEQRPALQGEDLLKMVGHCRFEKDELRAPAANFYAEQLVWLTRINNLRVYDENSQERPLTKGEHDLILNMPLEMKSDIKYSSLTSAFVKANLWKPGQFKYKSVDYEQKTQKKKKSAEPSDITKSSKKNPEDKVFYKCSHLHEIRKALGSSLSAEWDKIRTEVLAGKYERYNRIAYVLTVYKEDSDVIEHLSLYESRALIDALLTVRFKEFVALSEKALKKIIPYMVQGKRYDEACSESGYKHYKQNQNDVKKSKYLPPLFSGREPNGTLIFNEDLGDIPRNPVVLRVINQTRKVVNAIVKKYGSPESVHIELARDLAKSRAERNEIKKRNEEVASRRIKEREEFEKHYGAEKTNGTNLLKYRLYKEQDCKSMYSGKEIDHKRLFEKGYVQIDHILPYSRSYDDSQSNKVLVLTNENQDKGNRIPFEYFETKQQGFSWYEFEQWVKSCKNINQKKKRNLLRRSLSKDAKKDFLERNLNDTRYACRFVKNYIDRFLCLSENSDNSGCVVVAGQLTAYLRNCWGLNKVREENDRHHALDATVIACCTRKIVQKVGAWSKSREMNSYNSSYVDPDLPVDEDEMLLQKLYVNKRKPDFPKPWNCFRNEVESRVFESDLEKLKEELKQQCSYTESDLKMLELFLFLVHAKKLVKVHCMVIPFIVKLQK

SEQ ID NO: 517 - protein, 1130 aa, synthetic construct
  REGION 1..1130: note = MG89-35 effector
MSYVLGLDLGIASVGWSIVEPGKRIIDLGVRVFKKAETDKEGEPLNLIRRESRLSRRRLYRRSHRLNRLLNFLISSGLIHSKDEVLKNVYNENPWALRTLGLNSVLTNNQLARVIYHICKHRGFYWASSADDGEADKGKIKNSLSSNQKLMKEKCYKTVGQMIFSEYPNCQRNKSGEYSKSLPRTDLDIELREIFKAQQSFSNPIVTKDFISAILGSGDRKTGFLWEQRPALQGEDLLKMVGHCRFEKDELRAPAANFYAEQLVWLTRINNLRVYDENSQERPLTKEEHDLILNMPLEMKSDIKYSSLTSAFVKANLWKPGQFKYKSVDYEQKTQKKKKSAEPSDITKSSKKNPEDKVFYKCSHLHEIRKALGSSLSAEWDKIRTDVLAGKYERYNRIAYVLTVYKEDSDVIEHLSLYESRALIDALLTVRFKEFVALSEKALKKIIPYMVQGKRYDEACSESGYKHYKQNQNDVKKSKYLPPLFSGREPNGTLIFNEDLGDIPRNPVVLRVINQTRKVVNAIVKKYGSPESVHIELARDLAKSRAERNEIKKRNEEAASRRIKEREEFEKHYGAEKTNGTNLLKYRLYKEQDCKSMYSGKEIDHKRLFEKGYVQIDHILPYSRSYDDSQSNKVLVLTNENQDKGNRIPFEYFETKQQGFSWYEFEQWVKSCKNINQKKKRNLLRRSLSKDAKKDFLERNLNDTRYACRFVKNYIDRFLCLSENSDNSGCVVVAGQLTAYLRNCWGLNKVREENDRHHALDATVIACCTRKIVQKVGAWSKSREMNSYNSSYVDPDLPVDEDEMLLQKLYVNKRKPDFPKPWNCFRNEVESRVFESDLEKLKEELKQQCSYTESDLKNVRTLFVSRACEKIGKGALHGDTVYRQTSEMRKENVAVKKVSLKKLKYARIRAIVDADTRNKNLCDALKKRYEEYSSITGKDVSKIDKKDLSKIFSDDKPMHMPNSEGQEDPCNPIVKSVRVKEACSGVPIRNGVAENSTIVRVDIFKKKGQYYFVPIYSWNKSLPNRACQGKNKSDWVVVDDSYEWCFSVRTNDLLKIVIKGKTYFDYYITLDVHSDGRIRLLNHDRQEDDVHYENGEFRILIKNADSINKYNVDVLGNYYLAKPEKRLELA

SEQ ID NO: 518 - protein, 687 aa, synthetic construct
  REGION 1..687: note = MG89-36 effector
MSYVLGLDLGIASVGWSIVEPGKRIIDLGVRAFKKAETDKEGEPLNLIRRESRLSRRRLYRRAHRLNRLLNFLISSGLIHSKDEVLKNVYNENPWALRTLGLNSVLTNNQLARVIYHICKHRGFYWASSADDGQADNGKIKKSLSSNQLVMKEKCYKTVGQMIFSEYPNCQRNKSGEYSKSLPRTDLDIELREIFKAQQSFSNPIVTKDFISAILGSGDRKTGFLWEQRPALQGADLLKMVGHCRFEKDELRAPAANFYAEQLVWLTRINNLRVYDEDSQERPLTREERDLILNMPLEMKSDIKYSSLTSAFEKANLWKAGQFKYKSVDYEQKTQKKKKSAEPSDITKSSKKNPEDKVFYKSSHLHKIRKALGSSLSEEWEKIRTEVLSGKYERYNRIAYVLTVYKEDSDVIEQLSPYESRTLIEALLPVRFSGFVALSEKSLKKIIPHMFLGKRYDEACSEAHYKQNQSEGKKSKYLPHLFSGREPNGTLIFNEEIGDIPRNPVVLRVINQTRKVVNAIVKKYGSPESVHIELARDLAKSRAERNEIKKRNEEVASRRIKEREEFEKHYGAEKTNGTNLLKYRLYKEQDCKSMYSGKEIDHKRLFEKGYVQIDHILPYSRSYDDSQSNKVLVLTNENQDKGNRIPFEYFETKQQGFSWYEFEQWVKSCKNINQKKKKKSVKTLIIK

SEQ ID NO: 519 - protein, 420 aa, synthetic construct
  REGION 1..420: note = MG89-37 effector
MKNYIDRFLCLSENSDNSGCVVVAGQLTAYLRNCWGLNKVREENDRHHALDATVIACCTRKIVQKVGAWSKSREMNSYNSSYVDPDLPVDEDEMLLQKLYVNKRKPDFPKPWNCFRNEVESRVFESDLEKLKEELKQQCSYTESDLKNVRTLFVSRACEKIGKGALHGDTVYRQTSEMRKENVAVKKVSLKKLKYARIGAIVDADTRNKNLCDALKKRYEEYSSITGKDVSKIDKKDLSKIFSDDKPMHMPNSEGQEDPCNPIVKSVRVKEACSGVPIRNGVAENSTIVRVDIFKKKGQYYFVPIYSWNKSLPNRACQGKNKSDWVVVDDSYEWCFSVRTNDLLKIVIKGKTYFDYYITLDVHSDGRIRLLNHDRQEDDVHYEKGEFRILIKNADSINKYNVDVLGNYYLAKPEKRLGLA

SEQ ID NO: 520 - protein, 1127 aa, synthetic construct
  REGION 1..1127: note = MG89-38 effector
MSYVLGLDLGIASVGWSIVEPGKRIIDLGVRVFKKAETDKEGEPLNLIRRESRLSRRRLYRRAHRLNRLLNFLISSGLIHSKDEVLKNVYNENPWALRTLGLNSVLTNNQLARVIYHICKHRGFYWASSADDGEADKGKIKNSLSSNQKLMKEKCYKTVGQMIFSEYPNCQRNKSGEYSKSLPRTDLDIELREIFKAQQSFSNPIVTKDFISAILGSGDRKTGFLWEQRPALQGADLLKMVGHCRFEKDELRAPAANFYAEQLVWLTRINNLRVYDEDSQERPLTREERDLILNMPLEMKSDIKYSSLTSAFEKANLWKAGQFKYKSVDYEQKTQKKKKSAEPSDITKSSKKNPEDKVFYKSSHLHKIRKALGSSLSEEWEKIRTEVLSGKYERYNRIAYVLTVYKEDSDVIEQLSPYESRTLIEALLPVRFSGFVALSEKSLKKIIPHMFLGKRYDEACSEAHYKQNQSEGKKSKYLPHLFSGREPNGTLIFNEEIGDIPRNPVVLRVINQTRKVVNAIVKKYGSPESVHIELARDLAKSRAERNEIKKRNEEAASRRIKEREEFEKHYGAEKPNGTNLLKYRLYKEQDCKSMYSGKEIDHKRLFEKGYVQIDHILPYSRSYDDSQSNKVLVLTNENQDKGNRIPFEYFETKQQGFSWYEFEQWVKSCKNINQKKKRNLLRRTLSNDAKKDFLERNLNDTRYACRFVKNYIDRFLCLSENSDNSGCVVVAGQLTAYLRNCWGLNKVREENDRHHALDATVIACCTRKIVQKVGVWSKSREMNSYNSSYVDPDLPVDEDEMLLQKLYVNKRKPDFPKPWNCFRNEVESRVFESDLEKLKEELKQQCSYTESDLKNVRTLFVSRACEKIGKGALHGDTVYRQTSEMRKENVAVKKVSLKKLKYARIGAIVDADTRNKNLCDALKKRYEEYSSITGKDVSKIDKKDLSKIFSDDKPMHMPNSEGQEDPCNPIVKSVRVKEACSGVPIRNGVAENSTIVRVDIFKKKGQYYFVPIYSWNKSLPNRACQGKNKSDWVVVDDSYEWCFSVRTNDLLKIVIKGKTYFDYYITLDVHSDGRIRLLNHDRQEDDVHYEKGEFRILIKNADSINKYNVDVLGNYYLAKPEKRLELA

SEQ ID NO: 521 - protein, 1130 aa, synthetic construct
  REGION 1..1130: note = MG89-39 effector
MSYVLGLDLGIASVGWSIVEPGKRIIDLGVRVFKKAETDKEGEPLNLIRRESRLSRRRLYRRAHRLNRLLNFLISSGLIHSKDEVLKNVYNENPWALRTLGLNSVLTNNQLARVIYHICKHRGFYWASSADDGEADKGKIKNSLSSNQKLMKEKCYKTVGQMIFSEYPNCQRNKSGEYSKSLPRTDLDIELREIFKAQQSFSNPIVTKDFISAILGSGDRKTGFLWEQRPALQGEDLLKMVGHCRFEKDELRAPAANFYAEQLVWLTRINNLRVYDENSQERPLTKEEHDLILNMPLEMKSDIKYSSLTSAFVKANLWKPGQFKYKSVDYEQKTQKKKKSAEPSDITKSSKKNPEDKVFYKCSHLHEIRKVLGSSLSAEWDKIRTEVLAGKYERYNRIAYVLTVYKEDSDVIEHLSLYESRALIDALLTVRFKGFVALSEKALKKIIPYMVQGKRYDEACSESGYKHYKQNQNDVKKSKYLPPLFSGREPNGTLIFNEDLGDIPRNPVVLRVINQTRKVVNAIVKKYGSPESVHIELARDLAKSRAERNEIKKRNEEAASRRIKEREEFEKHYGAEKTNGTNLLKYRLYKEQDCKSMYSGKEIDHKRLFEKGYVQIDHILPYSRSYDDSQSNKVLVLTNENQNKGNRIPFEYFETKQQGFSWYEFEQWVKSCKNINQKKKRNLLRRSLSKDAKKDFLERNLNDTRYACRFVKNYIDRFLCLSENSDNSGCVVVAGQLTAYLRNCWGLNKVREENDRHHALDATVIACCTRKIVQKVGAWSKSREMNSYNSSYVDPDLPVDEDEMLLQKLYVNKRKPDFPKPWNCFRNEVESRVFESDLEKLKEELKQQCSYTESDLKNVRTLFVSRACEKIGKGALHGDTVYRQTSEMRKENVAVKKVSLKKLKYARIGAIVDADTRNKNLCDALKKRYEEYSSITGKDVSKIDKKDLSKIFSDDKPMHMPNSEGQEDPCNPIVKSVRVKEACSGVPIRNGVAENSTIVRVDIFKKKGQYYFVPIYSWNKSLPNRACQGKNKSDWVVVDDSYEWCFSVRTNDLLKIVIKGKTYFDYYITLDVHSDGRIRLLNHDRQEDDVHYENGEFRILIKNADSINKYNVDVLGNYYLAKPEKRLELA

SEQ ID NO: 522 - protein, 1130 aa, synthetic construct
  REGION 1..1130: note = MG89-40 effector
MSYVLGLDLGIASVGWSIVEPGKRIIDLGVRVFKKAETDKEGEPLNLIRRESRLSRRRLYRRAHRLNRFLNFLISSGLIHSKDEVLKNVYNENPWALRTLGLNSVLTNNQLARVIYHICKHRGFYWASSADDGEADKGKIKNSLSSNQKLMKEKCYKTVGQMIFSEYPNCQRNKSGEYSKSLPRTDLDIELREIFKAQQSFSNPIVTKDFISAILGSGDRKTGFLWEQRPALQGEDLLKMVGHCRFEKDELRAPAANFYAEQLVWLTRINNLRVYDENSQERPLTKEEHDLILNMPLEMKSDIKYSSLTSAFVKANLWKAGQFKYKSVDYEQKTQKKKKSAEPSDITKSSKKNPEDKVFYKCSHLHEIRKVLGSSLSAEWDKIRTEVLAGKYERYNRIAYVLTVYKEDSDVIEHLSLYESRTLIEALLPVRFNGFVSLSEKSLKKIIPYMVLGKRYDEACSEAGYKHYKQNQAKVKKSKYLPSLFSGREPNGTLIFNEDLGDIPRNPVVLRVINQTRKVVNAIVKKYGSPESVHIELARDLAKSRAERNEIKKRNEEVASRRIKEREEFEKHYGAEKTNGTNLLKYRLYKEQDCKSMYSGKEIDHKRLFEKGYVQIDHILPYSRSYDDSQSNKVLVLTNENQDKGNRIPYEYFESKQTDISWYEFEQWVKSCKNLNQKKKRNLLRNSLSKDAKKDFLERNLNDTRYACRFMKIYIDRFLCLSENSDKSGCVVVAGQLTANLRNCWGLNKVREENDRHHALDATVIACCTRKIVQKVGAWSKAREVEFNNSSYDDPDLPIDENELLLLNTFKNVKEPKFTEPWHCFREEVEARVFECDLEKLKKELKQQCSYTESDLKNVRTLFVSRACEKIGKGALHKDTVYRQTSEMRKENLAIKKVSLKKLKYAKISSIVDADTRNKNLCDALRKRYEEYSSTTGKDVSKIEEKDLAKIFSDDKPMHMPNSEGQEDPCNPIVKSVRVKDACSGVPIRNGVAENDNIMRVDIFKKRGKYYCIPIYAWNKTLPNKACVARKNESDWVEIDDSYEWCFSVRTNDLIRIDGKKESFFGYFNGFHRSVASFSILFHDRQISKKYKKGEKEGIGVKTAYSLTKYNVDVLGYYYLAKPEKRLELA

SEQ ID NO: 523 - protein, 1127 aa, synthetic construct
  REGION 1..1127: note = MG89-41 effector
MSYVLGLDLGIASVGWSIVEPGKRIIDLGVRAFKKAETDKEGEPLNLIRRESRLSRRRLYRRAHRLNRLLNFLISSGLIHSKDEVLKNVYNENPWALRTLGLNSVLTNNQLARVIYHICKHRGFYWASSADDGQADNGKIKKSLSSNQLVMKEKCYKTVGQMIFSEYPNCQRNKSGEYSKSLPRTDLDIELREIFKAQQSFSNPIVTKDFISAILGSGDRKTGFLWEQRPALQGADLLKMVGHCRFEKDELRAPAANFYAEQLVWLTRINNLRVYDEDSQERPLTREERDLILNMPLEMKSDIKYSSLTSAFEKANLWKAGQFKYKSVDYEQKTQKKKKSAEPSDITKSSKKNPEDKVFYKSSHLHKIRKALGSSLSEEWEKIRTEVLSGKYERYNRIAYVLTVYKEDSDVIEQLSPYESRTLIEALLPVRFSGFVALSEKSLKKIIPHMFLGKRYDEACSEAHYKQNQSEGKKSKYLPHLFSGREPNGTLIFNEEIGDIPRNPVVLRVINQTRKVVNAIVKKYGSPESVHIELARDLAKSRAERNEIKKRNEEVASRRIKEREEFEKHYGAEKTNGTNLLKYRLYKEQDCKSMYSGKEIDHKRLFEKGYVQIDHILPYSRSYDDSQSNKVLVLTNENQDKGNRIPFEYFETKQQGFSWYEFEQWVKSCKNINQKKKRNLLRRSLSNDAKKDFLERNLNDTRYACRFVKNYIDRFLCLSENSDNSGCVVVAGQLTAYLRNCWGLNKVREENDRHHALDATVIACCTRKIVQKVGAWSKSREMNSYNSSYVDPDLPVDEDEMLLQKLYVNKRKPDFPKPWNCFRNEVESRVFESDLEKLKEELKQQCSYTESDLKNVRTLFVSRACEKIGKGALHGDTVYRQTSEMRKENVAVKKVSLKKLKYARIGAIVDADTRNKNLCDALKKRYEEYSSITGKDVSKIDKKDLSKIFSDDKPMHMPNSEGQEDPCNPIVKSVRVKEACSGVPIRNGVAENSTIVRVDIFKKKGQYYFVPIYSWNKSLPNRACQGKNKSDWVVVDDSYEWCFSVRTNDLLKIVIKGKTYFDYYITLDVHSDGRIRLLNHDRQEDDVHYEKGEFRILIKNADSINKYNVDVLGNYYLAKPEKRLGLA

SEQ ID NO: 524 - protein, 1130 aa, synthetic construct
  REGION 1..1130: note = MG89-42 effector
MSYVLGLDLGIASVGWSIVEPGKRIIDLGVRVFKKAETDKEGEPLNLIRRESRLSRRRLYRRSHRLNRLLNFLISSGLIHSKDEVLKNVYNENPWALRTLGLNSVLTNNQLARVIYHICKHRGFYWASSADDGEADKGKIKNSLSSNQKLMKEKCYKTVGQMIFSEYPNCQRNKSGEYSKSLPRTDLDIELREIFKAQQSFSNPIVTKDFISAILGSGDRKTGFLWEQRPALQGEDLLKMVGHCRFEKDELRAPAANFYAEQLVWLTRINNLRVYDENSQERPLTKEEHDLILNMPLEMKSDIKYSSLTSAFVKANLWKPGQFKYKSVDYEQKTQKKKKSAEPSDITKSSKKNPEDKVFYKCSHLHEIRKALGSSLSAEWDKIRTEVLAGKYERYNRIAYVLTVYKEDSDVIEHLSLYESRALIDALLTVRFKEFVALSEKALKKIIPYMVQGKRYDEACSESGYKHYKQNQNDVKKSKYLPPLFSGREPNGTLIFNEDLGDIPRNPVVLRVINQTRKVVNAIVKKYGSPESVHIELARDLAKSRAERNEIKKRNEEAASRRIKEREEFEKYYGAEKTNGTNLLKYRLYKEQDCKSMYSGKEIDHKRLFEKGYVQIDHILPYSRSYDDSQSNKVLVLTNENQDKGNRIPFEYFETKQQGFSWYEFEQWVKSCKNINQKKKRNLLRRSLSKDAKKDFLERNLNDTRYACRFVKNYIDRFLCLSENSDNSGCVVVAGQLTAYLRNCWGLNKVREENDRHHALDATVIACCTRKIVQKVGAWSKSREMNSYNSSYVDPDLPVDEDEMLLQKLYVNKRKPDFPKPWNCFRNEVESRVFESDLEKLKEELKQQCSYTESDLKNVRTLFVSRACEKIGKGALHGDTVYRQTSEMRKENVAVKKVSLKKLKYARIGAIVDADTRNKNLCDALKKRYEEYSSITGKDVSKIDKKDLSKIFSDDKPMHMPNSEGQEDPCNPIVKSVRVKEACSGVPIRNGVAENSTIVRVDIFKKKGQYYFVPIYSWNKSLPNRACQGKNKSDWVVVDDSYEWCFSVRTNDLLKIVIKGKTYFDYYITLDVHSDGRIRLLNHDRQEDDVHYEKGEFRILIKNADSINKYNVDVLGNYYLAKPEKRLELA

SEQ ID NO: 525 - protein, 556 aa, synthetic construct
  REGION 1..556: note = MG89-43 effector
MSYVLGLDLGIASVGWSIVEPGKRIIDLGVRVFKKAETDKEGEPLNLIRRESRLSRRRLYRRAHRLNRLLNFLISSGLIHSKDEVLKNVYNENPWALRTLGLNSVLTNNQLARVIYHICKHRGFYWASSADDGEADKGKIKNSLSSNQKLMKEKCYKTVGQMIFSEYPNCQRNKSGEYSKSLPRTDLDIELREIFKAQQSFSNPIVTKDFISAILGSGDRKTGFLWEQRPALQGEDLLKMVGHCRFEKDELRAPAANFYAEQLVWLTRINNLRVYDENSQERPLTKEEHDLILNMPLEMKSDIKYSSLTSAFVKANLWKPGQFKYKSVDYEQKTQKKKKSAEPSDITKSSKKNPEDKVFYKCSHLHEIRKALGSSLSAEWDKIRTEVLAGKYERYNRIAYVLTVYKEDSDVIEHLSLYESRALIDALLTVRFKGFVALSEKALKKIIPYMVQGKRYDEACSESGYRHYKQNQNDVKKSKYLPPLFSGREPNGTLIFNEDLGDIPRNPVVLRVINQTRKVVNAIVKKYGSPESVHIELARDLAKSRAERNEIIYGPT

SEQ ID NO: 526 - protein, 321 aa, synthetic construct
  REGION 1..321: note = MG89-44 effector
MYSGKEIDHKRLFEKGYVQIDHILPYSRSYDDSQSNKVLVLTNENQDKGNRIPFEYFETKQQGFSWYEFEQWVKSCKNINQKKKRNLLRRSLSKDAKKDFLERNLNDTRYACRFVKNYIDRFLCLSENSDNSGCVVVAGQLTAYLRNCWGLNKVREENDRHHALDATVIACCTRKIVQKVGAWSKSREMNSYNSSYVDPDLPVDEDEMLLQKLYVNKRKPDFPKPWNCFRNEVESRVFESDLEKLKEELKQQCSYTESDLKNVRTLFVSRACEKIGKGALHGDTVYRQTSEMRKENVAVKKGFSKKTEICKDRSYRRCRYS

SEQ ID NO: 527 - protein, 206 aa, synthetic construct
  REGION 1..206: note = MG89-45 effector
MKKRYEEYSSITGKDVSKIDKKDLSKIFSDDKPMHMPNSEGQEDPCNPIVKSVRVKEACSGVPIRNGVAENSTIVRVDIFKKKGQYYFVPIYSWNKSLPNRACQGKNKSDWVVVDDSYEWCFSVRTNDLLKIVIKGKTYFDYYITLDVHSDGRIRLLNHDRQEDDVHYEKGEFRILIKNADSINKYNVDVLGNYYLAKPEKRLELA

SEQ ID NO: 528 - protein, 1126 aa, synthetic construct
  REGION 1..1126: note = MG89-46 effector
MLGLDLGIASVGWSIVEPGNRIIDLGVRVFKKAETDKEGDPLNLIRRESRLSRRRLYRRAHRLSRLLNFLISSGLIHSKDEVLKNVYNENPWALRTLGLNSVLANNQLARVIYHICKHRGFYWASSADDGQADNGKIKKSLSSNQLVMKEKGYKTVGQMIFTEYPNCQRNKSGEYSKSLPRTDLDKELRAIFKAQQSFSNPIVTKDFINAIVGCGDRKTGFLWEQRPALQGEDLLKMVGHCRFEKDELRAPAANFYSEQLVWLTKINNLRVYDEDSQERPLTREERDLILNMPLEMKSDIKYSSLTSAFEKANLWKSGQFKYKSVDYEQKTQKKKNTAKSVDITKSSKKNPEDKVFYKSSHLHEIRKALGSSLSEEWEKIRTEVLSGKYDRYNRIAYVLTVYKEDSDVIEQLSPYESRTLIEALLPVRFSGFVALSEKSLKKIIPHMVLGKRYDEACSEANYKHYKQNQAEFKKLKYLPPLFSGREPNGTLIFNEEIGDIPRNPVVLRVINQTRKVVNAIVKKYGSPKSVHIELARDLAKSRAERNEIEKRNEEAASRHIKERDEFEKLFGSNCLNGTNLLKYRLYKEQDCKSMYSGKEIDHKRLFEKGYVQIDHILPYSRSYDDSQSNKVLVLTNENQDKGNRIPFEYFEAKQHGFSWYEFEQWVKSCKNLNQKKKRNLLRCSLSKDAKKDFLERNLNDTRYACRFVKNYIDSFLCLSENSDNSGCVVVAGQLTAYLRNCWGLNKVREENDRHHALDATVIACCTRKIVQKVGAWSKSREMNSYNSSYVDPDSPVDEDEKLLQKLYVNTRKPDFPKPWECFRSEVESRVFESALEKLKEKLKLQCSYTESELKNVRTLFVSRACEKIGKGALHGDTVYRQTSEMRKENVAVKKVSLKKLKYARIGAIVDADTRNKNLCDALKKRYEEYARKIGKKIEDFVDKDIAKIFADDNPLHMPNSDGQEDPCNPIVKSVRVKEAFSGVPIRNGVAGNSTIIRVDLFKKDGKYYCIPVYAWNKTLPNRAYVSGKKETDWALVDDSFEWCFSIRQNELLKIKLKGETIFGYYNGFDRDRGSFNILLHDRQDGKDHKQGLIRKGIKTAISITKYDVDVLGNYYLSKPEKRLELA

SEQ ID NO: 529 - protein, 1130 aa, synthetic construct
  REGION 1..1130: note = MG89-47 effector
MSYVLGLDLGIASVGWSIVEPGKRIIDLGVRVFKKAETDKEGEPLNLIRRESRLSRRRLYRRAHRLNRLLNFLISSGLIHSKDEVLKNVYNENPWALRTLGLNSVLTNNQLARVIYHICKHRGFYWASSADDGEADKGKIKNSLSSNQKLMKEKCYKTVGQMIFSEYPNCQRNKSGEYSKSLPRTDLDIELREIFKAQQSFSNPIVTKDFISAILGSGDRKTGFLWEQRPALQGEDLLKMVGHCRFEKDELRAPAANFYAEQLVWLTRINNLRVYDENSQERPLTKEEHDLILNMPLEMKSDIKYSSLTSAFVKANLWKPGQFKYKSVDYEQKTQKKKKSAEPSDITKSSKKNPEDKVFYKCSHLHEIRKALGSSLSAEWDKIRTEVLAGKYERYNRIAYVLTVYKEDSDVIEHLSLYESRALIDALLTVRFKGFVALSEKALKKIIPYMVQGKRYDEACSESGYRHYKQNQNDVKKSKYLPPLFSGREPNGTLIFNEDLGDIPRNPVVLRVINQTRKVVNAIVKKYGSPESVHIELARDLAKSRAERNEIKKRNEEAASRRIKEREEFEKHYGAEKTNGTNLLKYRLYKEQDCKSMYSGKEIDHKRLFEKGYVQIDHILPYSRSYDDSQSNKVLVLTNENQDKGNRIPFEYFETKQQGFSWYEFEQWVKSCKNINQKKKRNLLRRSLSKDAKKDFLERNLNDTRYACRFVKNYIDRFLCLSENSDNSGCVVVAGQLTAYLRNCWGLNKVREENDRHHALDATVIACCTRKIVQKVGAWSKSREMNSYNSSYVDPDLPVDEDEMLLQKLYVNKRKPDFPKPWNCFRNEVESRVFESDLEKLKEELKQQCSYTESDLKNVRTLFVSRACEKIGKGALHGDTVYRQTSEMRKENVAVKKVSLKKLKYARIGAIVDADTRNKNLCDALKKRYEEYSSITGKDVSKIDKKDLSKIFSDDKPMHMPNSEGQEDPCNPIVKSVRVKEACSGVPIRNGVAENSTIVRVDIFKKKGQYYFVPIYSWNKSLPNRACQGKNKSDWVVVDDSYEWCFSVRTNDLLKIVIKGKTYFDYYITLDVHSDGRIRLLNHDRQEDDVHYEKGEFRILIKNADSINKYNVDVLGNYYLAKPEKRLELA

SEQ ID NO: 530 - protein, 535 aa, synthetic construct
  REGION 1..535: note = MG89-48 effector
MSYVLGLDLGIASVGWSIVEPGKRIIDLGVRVFKKAETDKEGEPLNLIRRESRLSRRRLYRRAHRLNRLLNFLISSGLIHSKDEVLKNVYNENPWALRTLGLNSVLTNNQLARVIYHICKHRGFYWASSADDGEADKGKIKNSLSSNQKLMKEKCYKTVGQMIFSEYPNCQRNKSGEYSKSLPRTDLDIELREIFKAQQSFSNPIVTKDFISAILGSGDRKTGFLWEQRPALQGEDLLKMVGHCRFEKDELRAPAANFYAEQLVWLTRINNLRVYDENSQERPLTKEEHDLILNMPLEMKSDIKYSSLTSAFVKANLWKPGQFKYKSVDYEQKTQKKKKSAEPSDITKSSKKNPEDKVFYKCSHLHEIRKALGSSLSAEWDKIRTEVLAGKYERYNRIAYVLTVYKEDSDVIEHLSLYESRALIDALLTVRFKGFVALSEKALKKIIPYMVQGKRYDEACSESGYRHYKQNQNDVKKSKYLPPLFSGREPNGTLIFNEDLGDIPRNPVVLRVINQTRKVVNAIVKKIRFSRICSY

SEQ ID NO: 531 - protein, 610 aa, synthetic construct
  REGION 1..610: note = MG89-49 effector
MLLLKKYGSPESVHIELARDLAKSRAERNEIKKRNEEAASRRIKEREEFEKHYGAEKTNGTNLLKYRLYKEQDCKSMYSGKEIDHKRLFEKGYVQIDHILPYSRSYDDSQSNKVLVLTNENQDKGNRIPFEYFETKQQGFSWYEFEQWVKSCKNINQKKKRNLLRRSLSKDAKKDFLERNLNDTRYACRFVKNYIDRFLCLSENSDNSGCVVVAGQLTAYLRNCWGLNKVREENDRHHALDATVIACCTRKIVQKVGAWSKSREMNSYNSSYVDPDLPVDEDEMLLQKLYVNKRKPDFPKPWNCFRNEVESRVFESDLEKLKEELKQQCSYTESDLKNVRTLFVSRACEKIGKGALHGDTVYRQTSEMRKENVAVKKVSLKKLKYARIGAIVDADTRNKNLCDALKKRYEEYSSITGKDVSKIDKKDLSKIFSDDKPMHMPNSEGQEDPCNPIVKSVRVKEACSGVPIRNGVAENSTIVRVDIFKKKGQYYFVPIYSWNKSLPNRACQGKNKSDWVVVDDSYEWCFSVRTNDLLKIVIKGKTYFDYYITLDVHSDGRIRLLNHDRQEDDVHYEKGEFRILIKNADSINKYNVDVLGNYYLAKPEKRLELA

SEQ ID NO: 532 - protein, 1132 aa, synthetic construct
  REGION 1..1132: note = MG89-50 effector
MNMSYVLGLDLGIASVGWSIVEPGKRIIDLGVRVFKKAETDKEGDPLNLIRRESRLSRRRLYRRAHRLNRLLNFLISSGLIHSKDEVLKNVYNENPWALRTLGLNSVLTNNQLARVIYHICKHRGFYWASSADDGQADNGKIKKSLSSNQLIMKEKGYKTVGQMIFTEYPNCQRNKSGEYSKSLPRTDLDKELRAIFKAQQSFSNPIVTKDFINAIVGIGDRKTGFLWEQRPALQGEDLLKMVGHCRFEKDELRAPAANFYSEQLVWLTKINNLRVYDEDSQERPLTREERNLILNMPLEMKSDIKYSSLTSAFEKASLWKAGQFKYKSVDYEQKTQKKKKTAKSADITKSSKKNPEDKVFYKSSHLHEIRKALGSSLSEEWEKIRTEVLSGKYDRYNRIAYVLTVYKEDSDVIEQLSPYESRTLIEALLPVRFNGFVSLSEKSLKKIIPYMVLGKRYDEACSEAGYKHYKQNQAKVKKSKYLPSLFSGREPNGTLIFNEEIGDIPRNPVVLRVINQTRKVVNAIVKKYGSPESVHIELARDLAKSRAERNEIEKRNEDAASRRIKEREEFKKHYGAEKTNGTNLLKYRLYKEQDCKSMYSCKTIDINRLFEEGYVQIDHILPYSRSYDDSQSNKVLVLTKENQDKGNRIPYEYFESKQTDISWYEFEQWVKSCKNLNQKKKRNLLRNSLSKDAKKDFLERNLNDTRYACRFMKNYIDRFLCLSENSDKSGCVVVAGQLTANLRNCWGLNKVREENDRHHALDATVIACCTRKIVQKVGAWSKAREVEFNNSSYDDPDLPIDENELLLLNTFKNVKEPKFTEPWHCFREEVEARVFECDLEKLKKELKQQCSYTESDLKNVRTLFVSRACEKIGKGALHKDTVYRQTSEMRKENLAIKKVSLKKLKYAKISSIVDADTRNKNLCDALRKRYEEYSSTTGKDVSKIEEKDLAKIFSDDKPMHMPNSEGQEDPCNPIVKSVRVKDACSGVPIRNGVAENDNIMRVDIFKKRGKYYCIPIYAWNKTLPNKACVARKNESDWVEIDDSYEWCFSVRTNDLIRIDGKKESFFGYFNGFHRSVASFSILFHDRQISKKYKKGEKEGIGVKTAYSLTKYNVDVLGYYYLAKPEKRLELA

SEQ ID NO: 533 - protein, 263 aa, synthetic construct
  REGION 1..263: note = MG89-51 effector
MSYVLGLDLGIASVGWSIVEPGKRIIDLGVRVFKKAETDKEGEPLNLIRRESRLSRRRLYRRAHRLNRLLNFLISSGLIHSKDEVLKNVYNENPWALRTLGLNSVLTNNQLARVIYHICKHRGFYWASSADDGEADKGKIKNSLSSNQKLMKEKCYKTVGQMIFSEYPNCQRNKSGEYSKSLPRTDLDIELREIFKAQQSFSNPIVTKDFISAILGSGDRKTGFLWEQRPALQGEDLLKMVGHCRFEKDELRAPAANFYAEQC

SEQ ID NO: 534 - protein, 1130 aa, synthetic construct
  REGION 1..1130: note = MG89-52 effector
MSYVLGLDLGIASVGWSIVEPGNRIIDLGVRVFKKAETDKEGDPLNLIRRESRLSRRRLYRRAHRLSRLLNFLISSGLIHSKDEVLKNVYNENPWELRTLGLNSVLTNNQLARVIYHICKHRGFYWASSADDGQADSGKIKKSLSSNQLVMKEKGYKTVGQMIFTEYPNCQRNKSGEYSKSLPRTDLDKELRAIFKAQQSFSNPIVTKDFINAIVGCGDRKTGFLWEQRPALQGEDLLKMVGHCRFEKDELRAPAANFYSEQLVWLTKINNLRVYDEDSQERPLTREERDLILNMPLEMKSDIKYSSLTSAFEKASLWKAGQFKYKSVDYEQKTQKKKKTAKSADITKSSKKNPEDKVFYKSSHLHEIRKALGSSLSEEWEKIRTEVLSGKYDRYNRIAYVLTVYKEDSDVIEQLSPYESRTLIEALLPVRFNGFVSLSEKSLKKIIPYMVLGKRYDEACSEAGYKHYKQNQAKVKKSKYLPSLFSGREPNGTLIFNEEIGDIPRNPVVLRVINQTRKVVNAIVKKYGSPESVHIELARDLAKSRAERNEIEKRNEDAASRRIKEREEFKKHYGAEKTSGTNLLKYRLYKEQDCKSMYSCKTIDINRLFEEGYVQIDHILPYSRSYDDSQSNKVLVLTKENQDKGNRIPYEYFESKQTDISWYEFEQWVKSCKNLNQKKKRNLLRNSLSKDAKKDFLERNLNDTRYACRFMKNYIDRFLCLSENSDKSGCVVVAGQLTANLRNCWGLNKVREENDRHHALDATVIACCTRKIVQKVGAWSKAREVEFNNSSYDDPDLPIDENELLLLNTFKNVKEPKFTEPWHCFREEVEARVFECDLEKLKKELKQQCSYTESDLKNVRTLFVSRACEKIGKGALHKDTVYRQTSEMRKENLAIKKVSLKKLKYAKISSIVDADTRNKNLCDALRKRYEEYSSTTGKDVSKIEEKDLAKIFSDDKPMHMPNSEGQEDPCNPIVKSVRVKDACSGVPIRNGVAENDNIMRVDIFKKRGKYYCIPIYAWNKTLPNKACVARKNESDWVEIDDSYEWCFSVRTNDLIRIDGKKESFFGYFNGFHRSVASFSILFHDRQISKKYKKGEKEGIGVKTAYSLTKYNVDVLGYYYLAKPEKRLELA

SEQ ID NO: 535 - protein, 1130 aa, synthetic construct
  REGION 1..1130: note = MG89-53 effector
MSYVLGLDLGIASVGWSIVEPGKRIIDLGVRVFKKAETDKEGEPLNLIRRESRLSRRRLYRRAHRLNRLLNFLISSGLIHSKDEVLKNVYNENPWALRTLGLNSVLTNNQLARVIYHICKHRGFYWASSADDGEADKGKIKNSLSSNQKLMKEKCYKTVGQMIFSEYPNCQRNKSGEYSKSLPRTDLDIELREIFKAQQSFSNPIVTKDFISAILGSGDRKTGFLWEQRPALQGEDLLKMVGHCRFEKDELRAPAANFYAEQLVWLTRINNLRVYDENSQERPLTKEEHDLILNMPLEMKSDIKYSSLTSAFVKANLWKPGQFKYKSVDYEQKTQKKKKSAEPSDITKSSKKNPEDKVFYKCSHLHEIRKALGSSLSAEWDKIRTEVLAGKYERYNRIAYVLTVYKEDSDVIEHLSLYESRALIDALLTVRFNGFVALSEKALKKIIPYMVQGKRYDEACSESGYKHYKQNQNDVKKSKYLPPLFSGREPNGTLIFNEDLGDIPRNPVVLRVINQTRKVVNAIVKKYGSPESVHIELARDLAKSRAERNEIKKRNEEATSRRIKEREEFEKHYGAEKTNGTNLLKYRLYKEQDCKSVYSGKEIDHKRLFEKGYVQIDHILPYSRSYDDSQSNKVLVLTNENQDKGNRIPFEYFETKQQGFSWYEFEQWVKSCKNINQKKKRNLLRRSLSKDAKKDFLERNLNDTRYACRFVKNYIDRFLCLSENSDNSGCVVIAGQLTAYLRNCWGLNKVREENDRHHALDATVIACCTRKIVQKVGAWSKSREMNSYNSSYVDPDLPVDEDEMLLQKLYVNKRKPDFPKPWNCFRKEVESRVFESDLEKLKEELKQQCSYTESDLKNVRTLFVSRACEKIGKGALHGDTVYRQTSEMRKENVAVKKVSLKKLKYARIGAIVDADTRNKNLCDALKKRYEEYSSITGKDVSKIDKKDLSKIFSDDKPMHMPNSEGQEDPCNPIVKSVRVKEACSGVPIRNGVAENSTIVRVDIFKKKGQYYFVPIYSWNKSLPNRACQGKNKSDWVVVDDSYEWCFSVRTNDLLKIVIKGKTYFDYYITLDVHSDGRIRLLNHDRQEDDVHYEKGEFRILIKNADSINKYNVDVLGNYYLAKPEKRLELA

SEQ ID NO: 536 - protein, 1131 aa, synthetic construct
  REGION 1..1131: note = MG89-54 effector
MNMSYVLGLDLGIASVGWSIVEPGNRIIDLGVRVFKKAETDKEGDPLNLIRRESRLSRRRLYRRAHRLSRLLNFLISSGLIHSKDEVLKNVYNENPWALRTLGLNSVLTNNQLARVIYHICKHRGFYWASSADDGQADNGKIKKSLSSNQLVMKEKGYKTVGQMIFTEYPNCQRNKSGEYSKSLPRTDLDKELRAIFKAQQSFSNPIVTKDFINAIVGCGDRKTGFLWEQRPALQGEDLLKMVGRCRFEKDELRAPAANFYSEQLVWLTKINNLRVYDEDSQERPLTREERDLILNMPLEMKSDIKYSSLTSAFEKANLWKSGQFKYKSVDYEQKTQKKKNTAKSVDITKSSKKNPEDKVFYKSSHLHEIRKALGSNLSEEWEKIRTEVLSGKYDRYNRIAYVLTVYKEDSDVIEQLSPYESRTLIEALLPVRFSGFVALSEKSLKKIIPHMVLGKRYDEACSEANYKHYKQNQAESKKLKYLPPLFSGREPNGTLIFNEEIGDIPRNPVVLRVINQTRKVVNAIVKKYGSPKSVHIELARDLAKSRAERNEIEKRNEEAASRRIKERDEFEKLFGSKCLNGTNLLKYRLYKEQDCKSMYSRKTIDIKRLFEKGYVQIDHILPYSRSYDDSQSNKVIVLTKENQDKGNQIPYEYFETRQANISWFEFERWVKSCKNLNQKKKSNLLRRSLSKDAKKDFLERNLNDTRYACRFVKNYIDSFLCLSENSDNSGCVVVAGQLTAYLRNCWGLNKVREENDRHHALDATVIACCTRKIVQKVGAWSKSREMNSYNSSYVDPDSPVDEDEKLLQKLYVNTRKPDFPKPWECFRSEVESRVFESDLEKLKEKLKLQCSYTESELKNVRTLFVSRACEKIGKGALHGDTVYRQTSEMRKENVAVKKVSLKKLKYARIGAIVDADTRNKNLCDVLKKRYEEYARKIGKKIEDFVDKDIAKIFADDNPLHMPNSDGQEDPCNPIVKSVRVKEAFSGVPIRNGVAGNSTIIRVDLFKKDGKYYCIPVYAWNKTLPNRAYVSGKKETDWALVDDSFEWCFSIRQNELLKIKLKGETIFGYYNGFDRDRGSFNILLHDRQDGKDHKQGLIRKRIKTAISITKYDVDVLGNYYLSKPEKRLELA

SEQ ID NO: 537 - protein, 1127 aa, synthetic construct
  REGION 1..1127: note = MG89-55 effector
MLGLDLGIASVGWSIVEPGKRIIDLGVRVFKKAETDKEGDPLNLIRRESRLSRRRLYRRAHRLNRLLNFLISSGLIHSKDEVLKNVYNENPWALRTLGLNSVLTNNQLARVIYHICKHRGFYWASSADDGQADNGKIKKSLSSNQLIMKEKGYKTVGQMIFTEYPNCQRNKSGEYSKSLPRTDLDKELRAIFKAQQSFSNPIVTKDFINAIVGVGDRKTGFLWEQRPALQGEDLLKMVGHCRFEKDELRAPAANFYSEQLVWLTKINNLRVYDEDSQERPLTIEERNLILNMPLEMKSDIKYSSLTSAFEKASLWKAGQFKYKSVDYEQKTQKKKKTAKSADITKSSKKNPEDKVFYKSSHLHEIRKALGSSLSEEWEKIRTEVLSGKYDRYNRIAYVLTVYKEDSDVIEQLSPYESRTLIEALLPVRFNGFVSLSEKSLKKIIPYMVLGKRYDEACSEAGYKHYKQNQAKVKKSKYLPSLFSGREHNGTLIFNEEIGDIPRNPVVLRVINQTRKVVNAIVKKYGSPESVHIELARDLAKSRAERNEIEKRNEDAASRRIKEREEFKKHYGAEKTNGTNLLKYRLYKEQDCKSMYSCKTIDINRLFEEGYVQIDHILPYSRSYDDSQSNKVLVLTKENQDKGNRIPYEYFESKQTDISWYEFEQWVKSCKNLNQKKKRNLLRNSLSKDAKKDFLERNLNDTRYACRFMKNYIDRFLCLSENSDKSGCVVVAGQLTANLRNCWGLNKVREENDRHHALDATVIACCTRKIVQKVGAWSKAREVEFNNSSYDDPDLPIDENELLLLNTFKNVKEPKFTEPWHCFREEVEARVFECDLEKLKKELKQQCSYTESDLKNVRTLFVSRACEKIGKGALHKDTVYRQTSEMRKENLAIKKVSLKKLKYAKISSIVDADTRNKNLCDALRKRYEEYSSTTGKDVSKIEEKDLAKIFSDDKPMHMPNSEGQEDPCNPIVKSVRVKDACSGVPIRNGVAENDNIMRVDIFKKRGKYYCIPIYAWNKTLPNKACVARKNESDWVEIDDSYEWCFSVRTNDLIRIDGKKESFFGYFNGFHRSVASFSILFHDRQISKKYKKGEKEGIGVKTAYSLTKYNVDVLGYYYLAKPEKRLELA

SEQ ID NO: 538 - protein, 1162 aa, synthetic construct
  REGION 1..1162: note = MG89-56 effector
MINLAIQIIYEKKNNFYILELKYYIDSILVINMSYVLGLDLGIASVGWSIVEPGNRIIDLGVRVFKKAETDKEGDPLNLIRRESRLSRRRLYRRAHRLSRLLNFLISSGLIHSKDEVLKNVYNENPWALRTLGLNSVLTNNQLARVIYHICKHRGFYWASSADDGQADSGKIKKSLSSNQLVMKEKGYKTVGQMIFTEYPNCQRNKSGEYSKSLPRTDLDKELRAIFKAQQSFSNPIVTKDFINAIVGCGDRKTGFLWEQRPALQGEDLLKMVGHCRLEKDELRAPAANFYSEQLVWLTKINNLRVYDEDSQERPLTREERDLILNMPLEMKSDIKYSSLTSAFEKANLWKSGQFKYKSVDYEQKILKKKNTAKSVDITKSSKKNPEDKVFYKSSHLHEIRKALGSSLSEEWEKIRTEVLSGKYDRYNRIAYVLTVYKEDSDVIEQLSPYESRTLIEALLPVRFSGFVALSEKSLKKIIPHMVLGKRYDEACSEANYKHYKQNQAESKKLKYLPPLFSGREPNGTLIFNEEIGDIPRNPVVLRVINQTRKVVNAIVKKYGSPESVHIELARDLAKSRAERNEIKKRNEEAASRRIKEREEFEKHYGAEKTNGTNLLKYRLYKEQDCKSMYSGKEIDHKRLFEKGYVQIDHILPYSRSYDDSQSNKVLVLTNENQDKGNRIPFEYFETKQQGFSWYEFEQWVKSCKNINQKKKRNLLRRSLSKDAKKDFLERNLNDTRYACRFVKNYIDRFLCLSENSDNSGCVVVAGQLTAYLRNCWGLNKVREENDRHHALDATVIACCTRKIVQKVGVWSKSREMNSYNSSYVDPDLPVDEDEMLLQKLYVNKRKPDFPKPWNCFRNEVESRVFESDLEKLKEELKQQCSYTESDLKNVRTLFVSRACEKIGKGALHGDTVYRQTSEMRKENVAVKKVSLKKLKYARIGAIVDADTRNKNLCDALKKRYEEYSSITGKDVSKIDKKDLSKIFSDDKPMHMPNSEGQEDPCNPIVKSVRVKEACSGVPIRNGVAENSTIVRVDIFKKKGQYYFVPIYSWNKSLPNRACQGKNKSDWVVVDDSYEWCFSVRTNDLLKIVIKGKTYFDYYITLDVHSDGRIRLLNHDRQEDDVHYEKGEFRILIKNADSINKYNVDVLGNYYLAKPEKRLELA

SEQ ID NO: 539 - protein, 862 aa, synthetic construct
  REGION 1..862: note = MG89-57 effector
MNKVILGLDIGIGSVGWALIEEGKRIIDLGVRTFDVSEDPVTKTPANRLRHIARRQRLKYHHRKSRLKSLLSYLVESKLIDDQDIILKNPQHKDIWQLRAKALKDKLSSDEIALIIYHICKHRGFYWVSSCERNDEEGKIKSSLATNAQLMKDKGYLTVGQMIYSEHPNSYRNKDGDYSKCISRIELDLELRTIFAKQQELCNTIISSDLITAIVGIGDRKSGYLWQQKPAIQGDQILNQVGRCRFESQETRAPKANYLAIRHAWITKLVRLKVVDNKFFKRFLHKDEFKVLKEYLFTLSKIPTFKSLENALIKSKIWKKGQFKIQSSEFDSNIRNSIEFDGLHYWIQLKNTFTSSGLESSWNRLIDEIKAGAFSRFNYIALVLTAYKEDDEIASHLKKIDLTDDEIAALLKIRFTKFYSFSEKALSNFVPYMEVGFSYEEACTKAGYDVYLKCQTKYEKTKYLPSLYYKDKKGNLILNNQHADLPCNHVILKALNQTIKVVNAVIKKYGTPSTVHIELARELSKSIVNRQEIQKAIYANTKRNTILKNDFIKHFGEDRLNDINLEKYKLYNDQEGISLYSGSTINLEKLLDDAYVQIDHILPFSKSFDNSKHNRVLVLTNENKAKGNKAPLEYVLLSKFNVEAYKNRILNLRFLSNGKKERLLTESFSRASFLGFKNANLVDTSYLCSYAKFYIESHLKTLDKGSGCVSIAANLTSFLRNKWELIKNRDTNDRHHAIDAVTIASCSEDLINLLKTLYSQNLMCSLDELNENYLSSTCKQINELMHLPWDSFSKEVNLRVNEDEQDKLKCELTKLGNYSKEQIESCRPLIISRAVRRIKKGVIHGDTVYKIKNKEKDACMVG

SEQ ID NO: 540 - protein, 1072 aa, synthetic construct
  REGION 1..1072: note = MG89-58 effector
MNKVILGLDIGIGSVGWALIEEGKRIIDLGVRTFDVSEDPVTKTPANRLRHIARRQRLKYHHRKSRLKSLLSYLVESKLIDDQDIILKNPQHKDIWQLRAKALKDKLSSDEIALIIYHICKHRGFYWVSSCERNDEEGKIKSSLATNAQLMKDKGYLTVGQMIYSEHPNSYRNKDGDYSKCISRIELDLELRTIFAKQQELCNTIISSDLITAIVGIGDRKSGYLWQQKPAIQGDQILNHVGRCRFESQETRAPKANYLAIRHAWITKLVRLKVVDNKFFKRFLHKDEFKVLKEYLFTLSKIPTFKSLENALIKSKIWKKGQFKIQSSEFDSNIRNSIEFDGLHYWIQLKNTFTSSGLESSWNRLIDEIKAGAFSRFNYIALVLTAYKEDDEIASHLKKIDLTDDEIAALLKIRFTKFYSFSEKALSNFVPYMEVGFSYEEACTKAGYDVYLKCQTKYEKTKYLPSLYYKDKKGNLILNNQHADLPCNHVILKALNQTIKVVNAVIKKYGTPSTVHIELARELSKSIVNRQEIQKAIYANTKRNTILKNDFIKHFGEDRLNDINLEKYKLYNDQEGISLYSGSTINLEKLLDDAYVQIDHILPFSKSFDNSKHNRVLVLTNENKAKGNKAPLEYVLLSKFNVEAYKNRILNLRFLSNGKKERLLTESFSRASFLGFKNANLVDTSYLCSYAKFYIESHLKTLDKGAGCVSIAANLTSFLRNKWELIKNRDTNDRHHAIDAVTIASCSEDLINLLKTLYSQNLMCSLDELNENYLSSTCKQINELMHLPWDSFSKEVNLRVNEDEQDKLKCELTKLGNYSKEQIESCRPLIISRAVRRIKKGVIHGDTVYKIKNKEKDEVVVRIPLQNLNLKKLELMVDKDRNINLYNLLKERLIAFNDNGEKAFLEPIYMPCKNSSQGPIIKKVSIIQVKTGIPVRGGIAINGELHRVDFFKKNEKYYAIPVYSWQQELPNKIAVKGKRECDWLTLDASYKFCFSVYKNDFLEISTKGKIIRGYYAEFDRHRCSILIKSHDRNELLEQRVAYMQVDYIKKLNVDLLGNVYDSFKEENTRERI

SEQ ID NO: 541 - protein, 1072 aa, synthetic construct
  REGION 1..1072: note = MG89-59 effector
MNKVILGLDIGIGSVGWALIEEGKRIIDLGVRTFDVSEDPVTKTPANRLRHIARRQRLKYHHRKSRLKSLLSYLVESKLIDDQDIILKNPQHKDIWQLRAKALKDKLSSDEIALIIYHICKHRGFYWVSSCERNDEEGKIKSSLATNAQLMKDKGYLTVGQMIYSEHPNSYRNKDGDYSKCISRIELDLELRTIFAKQQELCNTIISSDLITAIVGIGDRKSGYLWQQKPAIQGDQILNQVGRCRFESQETRAPKANYLAIRHAWITKLVRLKVVDNKFFKRFLHKDEFKVLKEYLFTLSKIPTFKSLENALIKSKIWKKGQFKIQSSEFDSNIRNSIEFDGLHYWIQLKNTFTSSGLESSWNRLIDEIKAGAFSRFNYIALVLTAYKEDDEIASHLKKIDLTDDEIAALLKIRFTKFYSFSEKALSNFVPYMEVGFSYEEACTKAGYDVYLKCQTKYEKTKYLPSLYYKDKKGNLILNNQHADLPCNHVILKALNQTIKVVNAVIKKYGTPSTVHIELARELSKSIVNRQEIQKAIYANTKRNTILKNDFIKHFGEDRLNDINLEKYKLYNDQEGISLYSGSTINLEKLLDDAYVQIDHILPFSKSFDNSKHNRVLVLTNENKAKGNKAPLEYVLLSKFNVEAYKNRILNLRFLSNGKKERLLTESFSRASFLGFKNANLVDTSYLCSYAKFYIESHLKTLDKGAGCVSIAANLTSFLRNKWELIKNRDTNDRHHAIDAVTIASCSEDLINLLKTLYSQNLMCSLDELNENYLSSTCKQINELMHLPWDSFSKEVNLRVNEDEQDKLKCELTKLGNYSKEQIESCRPLIISRAVRRIKKGVIHGDTVYKIKNKEKDEVVVRIPLQNLNLKKLELMVDKDRNINLYNLLKERLIAFNDNGEKAFLEPIYMPCKNSSQGPIIKKVSIIQVKTGIPVRGGIAINGELHRVDFFKKNEKYYAIPVYSWQQELPNKIAVKGKRECDWLTLDASYKFCFSVYKNDFLEISTKGKIIRGYYAEFDRHRCSILIKSHDRNELLEQRVAYMQVDYIKKLNVDLLGNVYDSFKEENTRERI

SEQ ID NO: 542 - protein, 1136 aa, synthetic construct
  REGION 1..1136: note = MG89-60 effector
MGYVFGLDMGIASVGWSVIEPGKSIVDLGVRIFKKAETDKEGDPLNLIRRVSRLGRRRIYRRAQRLNRLLNFLIASGFISNKEEILKNEFNDNPWELRNVGLNSVLTNNQIARVIYHICKHRGFYWSSSADADSGDDGGKIKKSLSSNQKLMEEKGYKTVGQMIFTEYPDCQRNKNKDYTKSLSRVALYEELKEILNAQIGFHNPLVTDEFCKAIIGNGDKKSGFLWEQKPALQGEKLLEMVGHCRFERDELRCPTANYFSERHVWLTKIINLRVYGADNQERPLTSEERAVIIDKALEIKSDIKYSTLTASFIKAGLWTLGEYKYKGIDYEQSVIKKSTKKTDVTGADNKSVSKKDPEDKIFFKRSHLHEIRMALESNKLSDVWDDIKSEILSGNFERYNRIAYVLTVYKEDSDVIEKLSDTENSAVINALLTVRFKEFNSLSEKALKKIVPFMEQGKRYDEACKEAGYQHYKQSQKEDIKSKYLPPLFSGREPNGTLIFNEDIGDVPRNPVVLRVINQTRKVVNALVKKYGSPESIHIELARDLSKPFSERMEDKRRQDDTEYKRLKEREEFIKFFGEGACNGRNLEKFKLFKEQNEKSMYSLKPIDIHRLFENGYVEVDHILPYSRCYNDSQSNKVLVLTKENQDKGNQIPYEYFTRQKRDIDWHEFEEWVKSSKTFSKNKKSNLLRTSLSKDSKNEFLSRNLNDTRYACKFMKNYIDRFLSLSESADKSGCVVVSGQLTAYLRRNWGLSKVREKNDRHHALDACVIACCSRSIIQKIGYWSRAKECRYLSTSYDDPDVPVSDEEMLLQGTFTKEDKPKFPKPWGHFREEVMGRVFADNLEKLKEDLQVFCGYSDNQLNCVRTLFVSRACEKLGKGALHADTVRRQSLAMRKDNLAVSKVSLQKLSYSDIDKIVDAETRNKNLCNALRARFEKYCRDNGKDLTKKLDDKDKVKIFSDEKPMHMPNSDGVEDPRNPIVKSVRIIEKFSGVPIRNGVAGNGDIVRIDIFKKSNKYYCVPIYSINKELPNLACVANKNESNWDVIDSSFEWCFSIRQNELIRIEQKNNFYFGYFNSFDRGNGTFSILLHDREDSKDHKKGEIRGIGVKTALSLTKYYVDVLGNYYKAQPEKRLELA

SEQ ID NO: 543 - protein, 922 aa, synthetic construct
  REGION 1..922: note = MG89-61 effector
MLDKGYKTIGQMIFNEFPNHYRNKDGDYTKCISRVELDKELNTIFTCQKSLGNNDVTEELMTGVLGVGDRKSGFLWQQRPSIQGEQILKQVGRCRFEANEYRAPKANYFAMRHVWLTKLSRLKVVDADYKERSLTHYEFMSLKDIIFEIKNDITFKALENKLIKSYIWSKDQFHLKSAEFTSNLTKSVKFHAMDAWINIRKAFEKADLKDSWNYLLQDIKQGNVDKYNKIVFILTVFKDDAEIIERLGKLDLTQEEIVALSTLRFTKFASFSEKALAKFIPFMEEGLAYETASAKAGYNYSLISQEPIIKHKYLPSIYLENNGKIVKNSKILDLPDNPIVLKALNQTRKVINAVIKKYDSPDEIHIELARELSKTAEQRLEEDHKLNLLYKKNCKLKDEFVSKYGLHNFNVSNFEKFKLFKEQNGISTYTGAIIDEERLLEDFYVQVDHIIPYSKSFDNSFNNKAIVLSKENKDKGNRTALEYIYQENLNIESYKQRVLGNSNFSRLKISNLMLANFEREAATNFKARHLRDTAYICSFAKNFIESYLLLNANKSNSRCLVVPSNLTSLLRQHWGIKKNRLKNDRHHATDAAVIAGCSFSILNAIERISKKSDIGTLEDFSKDPQFTDEVISLSNVLKLPWKHFSNEVDFRVNEDNRQILIDRLSQLGTYDFNDLKRVKTLNVSRAPKRLKQGKAHGDTIYKIKSLENEEVVVRVPLKKLNLKKLECMVDKQRNINLYNVLKQRLIEFNDDGEKAFATPIYMPCKDPKNAPLIRKVSILQIKSGILVRGGIVSNGDIHRIDFFKKNDKYYAIPVYVNQKELPNKIAVKGKRQKDWLTLDNSYEFCLSVYKNDFLEVDTKDGLFRGYYAEFDRHRCSILLKSHDRDEKLEKRIAYMQVKSITKLHVDVLGNLYQADFMERQAI

SEQ ID NO: 544 - protein, 316 aa, synthetic construct
  REGION 1..316: note = MG89-62 effector
MSYVLGLDLGIASVGWSIVEPGKRIIDLGVRVFKKAETDKEGEPLNLIRRESRLSRRRLYRRAHRLSRLLNFLISSGLIHSKDEVLKNVYNENPWALRTLGLNSVLTNNQLARVIYHICKHRGFYWASSADDGEADKGKIKNSLSSNQKLMKEKCYKTVGQMIFSEYPNCQRNKSGEYSKSLPRTDLDIELREIFKAQQSFSNPIVTKDFISAILGSGDRKTGFLWEQRPALQGADLLKMVGHCRFEKDELRAPAANFYAEQLVWLTRINNLRVYDEDSQERPLTREERDLILNMPLEMKSDIKYSSLTSAFEKAN

SEQ ID NO: 545 - protein, 411 aa, synthetic construct
  REGION 1..411: note = MG89-63 effector
MLGLDLGIASVGWSIVEPGKRIIDLGVRVFKKAETDKEGDPLNLIRRESRLSRRRLYRRAHRLSRLLNFLISSGLIHSKDEVLKNVYNENPWALRTLGLNSVLTNNQLARVIYHICKHRGFYWASSADDGQADNGKIKKSLSSNQLVMQEKGYKTVGQMIFTEYPNCQRNKSGEYSKSLPRTDLDKELRAIFKAQQSFSNPIVTKDFINAIVGCGDRKTGFLWEQRPALQGEDLLKMVGHCRFEKDELRAPAANFYSEQLVWLTKINNLRVYDEDSQERPLTREERNLILNMPLEMKSDIKYSSLTSAFEKASLWKAGQFKYKSVDYEQKTQKKKNTAKSVDITKSSKKNPEDKVFYKSSHLHEIRKALGSSLSEEWEKIRTEVLSGKYDRYNRIAYVLTVYKEDSDVIEQ

SEQ ID NO: 546 - protein, 1127 aa, synthetic construct
  REGION 1..1127: note = MG89-64 effector
MSYVLGLDLGIASVGWSIVEPGKRIIDLGVRVFKKAETDKEGEPLNLIRRESRLSRRRLYRRAHRLNRLLNFLISSGLIHSKDEVLKNVYNENPWALRTLGLNSVLTNNQLARVIYHICKHRGFYWASSADDGEADKGKIKNSLSSNQKLMKEKCYKTVGQMIFSEYPNCQRNKSGEYSKSLPRTDLDIELREIFKAQQSFSNPIVTKDFISAILGSGDRKTGFLWEQRPALQGADLLKMVGHCRFEKDELRAPAANFYAEQLVWLTRINNLRVYDEDSQERPLTREERDLILNMPLEMKSDIKYSSLTSAFEKANLWKAGQFKYKSVDYEQKTQKKKKSAEPSDITKSSKKNPEDKVFYKSSHLHKIRKALGSSLSEEWEKIRTEVLSGKYERYNRIAYVLTVYKEDSDVIEQLSPYESRTLIEALLPVRFSGFVALSEKSLKKIIPHMFLGKRYDEACSEAHYKQNQSEGKKLKYLPHLFSGREPNGTLIFNEEIGDIPRNPVVLRVINQTRKVVNAIVKKYGSPESVHIELARDLAKSRAERNEIKKRNEEAASRRIKEREEFEKHYGAEKPNGTNLLKYRLYKEQDCKSMYSGKEIDHKRLFEKGYVQIDHILPYSRSYDDSQSNKVLVLTNENQDKGNRIPFEYFETKQQGFSWYEFEQWVKSCKNINQKKKRNLLRRSLSNDAKKDFLERNLNDTRYACRFVKNYIDRFLCLSENSDNSGCVVVAGQLTAYLRNCWGLNKVREENDRHHALDATVIACCTRKIVQKVGVWSKSREMNSYNSSYVDPDLPVDEDEMLLQKLYVNKRKPDFPKPWNCFRNEVESRVFESDLEKLKEELKQQCSYTESDLKNVRTLFVSRACEKIGKGALHGDTVYRQTSEMRKENVAVKKVSLKKLKYARIGAIVDADTRNKNLCDALKKRYEEYSSITGKDVSKIDKKDLSKIFSDDKPMHMPNSEGQEDPCNPIVKSVRVKEACSGVPIRNGVAENSTIVRVDIFKKKGQYYFVPIYSWNKSLPNRACQGKNKSDWVVVDDSYEWCFSVRTNDLLKIVIKGKTYFDYYITLDVHSDGRIRLLNHDRQEDDVHYEKGEFRILIKNADSINKYNVDVLGNYYLAKPEKRLELA

SEQ ID NO: 547 - protein, 1129 aa, synthetic construct
  REGION 1..1129: note = MG89-65 effector
MSYVLGLDLGIASVGWSIVEPGNRIIDLGVRVFKKAETDKEGEPLNLIRRESRLSRRRLYRKAHRLSRLLNFLISSGLIHSKDEVLKNVYNENPWALRTLGLNSVLTNNQLARVIYHICKHRGFYWASSADDGQADNGKIKKSLSSNQLVMKEKGYKTVGQMIFTEYPNCQRNKSGEYSKSLPRTDLDKELRAIFKAQQSFSNPIVTKDFINAIVGCGGRKTGFLWEQRPALQGEDLLKMVGHCRFEKDELRAPAANFYSEQLVWLTKINNLRVYDEDSQERPLTREERDLILNMPLEMKSDIKYSSLTSAFEKANLWKSGQFKYKSVDYEQKTQKKKNTAKSVDITKSSKKNPEDKVFYKSSHLHEIRKALGSSLSEEWEKIRTEVLSGKYDRYNRIAYVLTVYKEDSDVIEQLSPYESRTLIEALLPVRFSGFVALSEKSLKKIIPHMVLGKRYDEACSEANYKHYKQNQAEFKKLKYLPPLFSGREPNGTLIFNEEIGDIPRNPVVLRVINQTRKVVNAIVKKYGSPKSVHIELARDLAKSRAERNEIEKRNEEAASRRIKERDEFEKLFGSKCLNGTNLLKYRLYKEQDCKSMYSGKEIDHKRLFEKGYVQIDHILPYSRSYDDSQSNKVLVLTNENQDKGNRIPFEYFEAKQHGFSWYEFEQRVKSCKNLNQKKKRNLLRCSLSKDAKKDFLERNLNDTRYACRFVKNYIDSFLCLSENSDNSGCVVVAGQLTAYLRNCWGLNKVREENYRHHALDATVIACCTRKIVQKVGAWSKSREMNSYNSSYVDPDSPVDEDEKLLQKLYVNTRKPDFPKPWECFRSEVESRVFESALEKLKEKLKLQCSYTESELKNVRTLFVSRACEKIGKGALHGDTVYRQTSEMRKENVAVKKVSLKKLKYARIGAIVDADTRNKNLCDALKKRYEEYARKIGKKIEDFVDKDIAKIFADDNPLHMPNSDGQEDPCNPIVKSVRVKEAFSGVPIRNGVAGNSTIIRVDLFKKDGKYYCIPVYAWNKTLPNRAYVSGKKETDWALVDDSFEWCFSIRQNELLKIKLKGETIFGYYNGFDRDRGSFNILLHDRQDGKDHKQGLIRKGIKTAISITKYDVDVLGNYYLSKPEKRLELA

SEQ ID NO: 548 - protein, 884 aa, synthetic construct
  REGION 1..884: note = MG89-66 effector
MNKMILGLDIGIGSVGWALIEEGKRIIGLGVRTFDVSEDPVTKATLNQVRADARRQRHQIKHKASRLKGLLNLLLKLELINDKNIILQNPLHKDIWELRAKALTEKITSDELALIIYHICNHRGFYWVSSCSTNNEDGLIKKALSSNEQIMLDKGYKTIGQMIFNEFPNHYRNKDGDYTKCISRVELDKELNTIFTCQKSLGNNDVTEELMTGVLGVGDRKSGFLWQQRPSIQGEQILKQVGRCRFEANEYRAPKANYFAMRHVWLTKLSRLKVVDADYKERSLTHYEFMSLKDIIFEIKNDITFKALENKLIKSYIWSKDQFHLKSAEFTSNLTKSVKFHAMDAWINIRKAFEKADLKDSWNYLLQDIKQGNVDKYNKIVFILTVFKDDAEIIERLGKLDLTQEEIVALSTLRFTKFASFSEKALAKFIPFMEEGLAYETASAKAGYNYSLISQEPIIKHKYLPSIYLENNGKIVKNSKILDLPDNPIVLKALNQTRKVINAVIKKYDSPDEIHIELARELSKTAEQRLEEDHKLNLLYKKNCKLKDEFVSKYGLHNFNVSNFEKFKLFKEQNGISTYTGAIIDEERLLEDFYVQVDHIIPYSKSFDNSFNNKAIVLSKENKDKGNRTALEYIYQENLNIESYKQRVLGNSNFSRLKISNLMLANFEREAATNFKARHLRDTAYICSFAKNFIESYLLLNANKSNSRCLVVPSNLTSLLRQHWGIKKNRLKNDRHHATDAAVIAGCSFSILNAIERISKKSDIGTLEDFSKDPQFTDEVISLSNVLKLPWKHFSNEVDFRVNEDNRQILIDRLSQLGTYDFNDLKRVKTLNVSRAPKRLKQGKAHGDTIYKIKSLENEEVVVRVPLKKLNLKKLECMVDVTAL

SEQ ID NO: 549 - protein, 884 aa, synthetic construct
  REGION 1..884: note = MG89-67 effector
MNKMILGLDIGIGSVGWALIEEGKRIIGLGVRTFDVSEDPVTKATLNQVRADARRQRHQIKHKASRLKGLLNLLLKLELINDKNIILQNPLHKDIWELRAKALTEKITSDELALIIYHICNHRGFYWVSSCSTNNEDGLIKKALSSNEQIMLDKGYKTIGQMIFNEFPNHYRNKDGDYTKCISRVELDKELNTIFTCQKSLGNNDVTEELMTGVLGVGDRKSGFLWQQRPSIQGEHILKQVGRCRFEANEYRAPKANYFAMRHVWLTKLSRLKVVDADYKERSLTHYEFMSLKDIIFEIKNDITFKALENKLIKSYIWSKDQFHLKSAEFTSNLTKSVKFHAMDAWINIRKAFEKADLKDSWNYLLQDIKQGNVDKYNKIVFILTVFKDDAEIIERLGKLDLTQEEIVALSTLRFTKFASFSEKALAKFIPFMEEGLAYETASAKAGYNYSLISQEPIIKHKYLPSIYLENNGKIVKNSKILDLPDNPIVLKALNQTRKVINAVIKKYDSPDEIHIELARELSKTAEQRLEEDHKLNLLYKKNCKLKDEFVSKYGLHNFNVSNFEKFKLFKEQNGISTYTGAIIDEERLLEDFYVQVDHIIPYSKSFDNSFNNKAIVLSKENKDKGNRTALEYIYQENLNIESYKQRVLGNSNFSRLKISNLMLANFEREAATNFKARHLRDTAYICSFAKNFIESYLLLNANKSNSRCLVVPSNLTSLLRQHWGIKKNRLKNDRHHATDAAVIAGCSFSILNAIERISKKSDIGTLEDFSKDPQFTDEVISLSNVLKLPWKHFSNEVDFRVNEDNRQILIDRLSQLGTYDFNDLKRVKTLNVSRAPKRLKQGKAHGDTIYKIKSLENEEVVVRVPLKKLNLKKLECMVDVTAL

SEQ ID NO: 550 - protein, 8 aa, synthetic construct
  REGION 1..8: note = MG44-1 single guide 3' PAM
NNNAACNN

SEQ ID NO: 551 - protein, 8 aa, synthetic construct
  REGION 1..8: note = MG46-1 single guide 3' PAM
NNYAANNN

SEQ ID NO: 552 - protein, 7 aa, synthetic construct
  REGION 1..7: note = MG71-1 single guide 3' PAM
NNRMYNN

SEQ ID NO: 553 - protein, 8 aa, synthetic construct
  REGION 1..8: note = MG71-2 single guide 3' PAM
NNNACTNN

SEQ ID NO: 554 - protein, 8 aa, synthetic construct
  REGION 1..8: note = MG72-1 single guide 3' PAM
NNWANCNN

SEQ ID NO: 555 - protein, 8 aa, synthetic construct
  REGION 1..8: note = MG73-1, MG73-2 single guide 3' PAM
NNRNTTNN

SEQ ID NO: 556 - protein, 8 aa, synthetic construct
  REGION 1..8: note = MG74-1 single guide 3' PAM
NNNNRMAA

SEQ ID NO: 557 - protein, 6 aa, synthetic construct
  REGION 1..6: note = MG86-1 single guide 3' PAM
NYAAAR

SEQ ID NO: 558 - protein, 5 aa, synthetic construct
  REGION 1..5: note = MG86-2 single guide 3' PAM 1
NRAAR

SEQ ID NO: 559 - protein, 6 aa, synthetic construct
  REGION 1..6: note = MG86-2 single guide 3' PAM 2
NYAAAA

SEQ ID NO: 560 - protein, 7 aa, synthetic construct
  REGION 1..7: note = MG87-1 single guide 3' PAM
NNNNGTY

SEQ ID NO: 561 - protein, 5 aa, synthetic construct
  REGION 1..5: note = MG87-2 single guide 3' PAM
NNRNG

SEQ ID NO: 562 - protein, 7 aa, synthetic construct
  REGION 1..7: note = MG87-3 single guide 3' PAM
NNRTRTY

SEQ ID NO: 563 - protein, 5 aa, synthetic construct
  REGION 1..5: note = MG88-1 single guide 3' PAM
NRRRA

SEQ ID NO: 564 - protein, 6 aa, synthetic construct
  REGION 1..6: note = MG88-2 single guide 3' PAM
NRRWWW

SEQ ID NO: 565 - protein, 6 aa, synthetic construct
  REGION 1..6: note = MG88-3 single guide 3' PAM
NRRRNY

SEQ ID NO: 566 - protein, 6 aa, synthetic construct
  REGION 1..6: note = MG89-2 single guide 3' PAM
NNNNCC

SEQ ID NO: 567 - protein, 8 aa, synthetic construct
  REGION 1..8: note = MG89-3 single guide 3' PAM
NNNNCTAA

SEQ ID NO: 568 - DNA, 86 bp, synthetic construct
  misc_feature 1..86: note = MG44-1 sgRNA
  source 1..86: mol_type = other DNA
gtttgagagtcttgtgaaaacaaggcaagttcaaataaaacttttgtctaatcacttttcgcaggtgcgaacactaacgctctttt

SEQ ID NO: 569 - DNA, 93 bp, synthetic construct
  misc_feature 1..93: note = MG46-1 sgRNA
  source 1..93: mol_type = other DNA
gtttgagagtaggaaactgcaagttcaaataatattattatgaatgcgtcagataactgacaaacacagtgcgtgttataaaaagtctatttt

SEQ ID NO: 570 - DNA, 114 bp, synthetic construct
  misc_feature 1..114: note = MG71-1 sgRNA
  source 1..114: mol_type = other DNA
gtttgagagtgatgtagaaatacatcacgagttcaaaaaacatgatttattcaaatcgtcttcttcagaagaccccacagtgtgtggaactaaagcttgcttcggcaggctttt

SEQ ID NO: 571 - DNA, 107 bp, synthetic construct
  misc_feature 1..107: note = MG71-2 sgRNA
  source 1..107: mol_type = other DNA
gtttgagagtgagaaatcacgagttcaaaaaacatgatttattcaaaccgtcttcttcggaaggccccacagtgtgtggacagtaaagcttgcttcggcaagctttt

SEQ ID NO: 572 - DNA, 124 bp, synthetic construct
  misc_feature 1..124: note = MG72-1 sgRNA
  source 1..124: mol_type = other DNA
gtttgagagtagtgaaaactacaagttcaaatcaaaatttattctaatcgctctccggagcctccacaagagtggatttacaaatgtaattatgaaaagacttatttttccgataagtcttttt

SEQ ID NO: 573 - RNA, 95 nt, synthetic construct
  misc_feature 1..95: note = MG73-1 sgRNA
  source 1..95: mol_type = other RNA
gttatagtgggaaatcactataataagtgaaatcgcaaggctctgttcttgaacatcctttattataaaactcctgccaatcggttgggagtttt

SEQ ID NO: 574 - RNA, 93 nt, synthetic construct
  misc_feature 1..93: note = MG73-2 sgRNA
  source 1..93: mol_type = other RNA
gttgcagtaggaaactactgtaataagtgcaatcgcaaggctctgttcttgaacatcctttatttataactccggccaagtgcccggagtttt

SEQ ID NO: 575 - RNA, 91 nt, synthetic construct
  misc_feature 1..91: note = MG74-1 sgRNA
  source 1..91: mol_type = other RNA
gccgtggttggaaacaaccacggtaatcttttctgtggaaaagagctcctgtatggggatggattttaagatctgtccccatacatctttt

SEQ ID NO: 576 - RNA, 83 nt, synthetic construct
  misc_feature 1..83: note = MG86-1 sgRNA
  source 1..83: mol_type = other RNA
gttttaatacccgaaagggtattaaactaaggtcactttttagtggctgactttagagtatggctttggctatactccatttt

SEQ ID NO: 577 - RNA, 83 nt, synthetic construct
  misc_feature 1..83: note = MG86-2 sgRNA
  source 1..83: mol_type = other RNA
gttttaatacccgaaagggtattaaactaagactacgattttcgtagttgactttaggtgatggtttcgaccgtcaccctttt

SEQ ID NO: 578 - RNA, 81 nt, synthetic construct
  misc_feature 1..81: note = MG87-1 sgRNA
  source 1..81: mol_type = other RNA
gttttaagatactgagaaattagttttcttattataactctttaatgaggaaaccgggactacccaaaggtagtctctttt

SEQ ID NO: 579 - RNA, 80 nt, synthetic construct
  misc_feature 1..80: note = MG87-2 sgRNA
  source 1..80: mol_type = other RNA
gttttaggatgttgttgaaaaacaaagattcctattattacacgaatgtggaatccaaaaagagggttaatccctctttt

SEQ ID NO: 580 - RNA, 73 nt, synthetic construct
  misc_feature 1..73: note = MG87-3 sgRNA
  source 1..73: mol_type = other RNA
gttttaggatccgaaagggtttcctattataactcattatgaggaacccaaaagataccttcgggtatctttt

SEQ ID NO: 581 - RNA, 96 nt, synthetic construct
  misc_feature 1..96: note = MG88-1 sgRNA
  source 1..96: mol_type = other RNA
gttgcggctagacgaaagtctagtcgttaataagaacctcttgcaagagaggagatttcaccattaaaaacggacacttcggtgtccgtttatttt

SEQ ID NO: 582 - RNA, 89 nt, synthetic construct
  misc_feature 1..89: note = MG88-2 sgRNA
  source 1..89: mol_type = other RNA
gttgcgactagacatctgaaaagatgtctagtcgctaataagaaatttatttcgatattaagcccgattacttaggtagtcgggctttt

SEQ ID NO: 583 - RNA, 76 nt, synthetic construct
  misc_feature 1..76: note = MG88-3 sgRNA
  source 1..76: mol_type = other RNA
gttactacttggaaacaagtagtcaataagaacaattcataatgtaaaatggctgagttcgcctcagccatttttt

SEQ ID NO: 584 - RNA, 88 nt, synthetic construct
  misc_feature 1..88: note = MG89-2 sgRNA
  source 1..88: mol_type = other RNA
gttgtagcttccttgaagaaattcaacgttgttacaataaggttttcgaaagattaccgaacccgccctcacttaggtgagggctttt

SEQ ID NO: 585 - RNA, 87 nt, synthetic construct
  misc_feature 1..87: note = MG89-3 sgRNA
  source 1..87: mol_type = other RNA
gttgtagcttcctttaagaaattagacgttgttacaataaggttttcgaaagattaccgtacccgaccccacttaggtggggtcttt

SEQ ID NO: 586 - protein, 7 aa, synthetic construct
  REGION 1..7: note = SV40
PKKKRKV

SEQ ID NO: 587 - protein, 16 aa, synthetic construct
  REGION 1..16: note = nucleoplasmin bipartite NLS
KRPAATKKAGQAKKKK

SEQ ID NO: 588 - protein, 9 aa, synthetic construct
  REGION 1..9: note = c-myc NLS
PAAKRVKLD

SEQ ID NO: 589 - protein, 11 aa, synthetic construct
  REGION 1..11: note = c-myc NLS
RQRRNELKRSP

SEQ ID NO: 590 - protein, 38 aa, synthetic construct
  REGION 1..38: note = hRNPA1 M9 NLS
NQSSNFGPMKGGNFGGRSSGPYGGGGQYFAKPRNQGGY

SEQ ID NO: 591 - protein, 42 aa, synthetic construct
  REGION 1..42: note = Importin-alpha IBB domain
RMRIZFKNKGKDTAELRRRRVEVSVELRKAKKDEQILKRRNV

SEQ ID NO: 592 - protein, 8 aa, synthetic construct
  REGION 1..8: note = Myoma T protein
VSRKRPRP

SEQ ID NO: 593 - protein, 8 aa, synthetic construct
  REGION 1..8: note = Myoma T protein
PPKKARED

SEQ ID NO: 594 - protein, 8 aa, synthetic construct
  REGION 1..8: note = p53
PQPKKKPL

SEQ ID NO: 595 - protein, 12 aa, synthetic construct
  REGION 1..12: note = mouse c-abl IV
SALIKKKKKMAP

SEQ ID NO: 596 - protein, 5 aa, synthetic construct
  REGION 1..5: note = influenza virus NS1
DRLRR

SEQ ID NO: 597 - protein, 7 aa, synthetic construct
  REGION 1..7: note = influenza virus NS1
PKQKKRK

SEQ ID NO: 598 - protein, 10 aa, synthetic construct
  REGION 1..10: note = Hepatitis virus delta antigen
RKLKKKIKKL

SEQ ID NO: 599 - protein, 10 aa, synthetic construct
  REGION 1..10: note = mouse Mx1 protein
REKKKFLKRR

SEQ ID NO: 600 - protein, 20 aa, synthetic construct
  REGION 1..20: note = human poly(ADP-ribose) polymerase
KRKGDEVDGVDEVAKKKSKK

SEQ ID NO: 601 - protein, 17 aa, synthetic construct
  REGION 1..17: note = steroid hormone receptor (human) glucocorticoid
RKCLQAGMNLEARKTKK

SEQ ID NO: 602 - protein, 1340 aa, synthetic construct
  REGION 1..1340: note = MG44-217 effector
MQKFFLGLDIGTDSVGIACTDEQYRLLRARGKDLWAVRLFDPANDAKQRRSYRTLRRRIARRKERIALLQEIFAPVLEDANFFLRLKNSALYEEDKEEGLPRFTLFADENYTDKHFYAEYPTIFHLRQALIDRGAADLRLYYLALHHIIKYRGHFLFEGDSVGGAQNVSKLFERFNAVSEELLEEPLRLPEACAGDFLRIAAGGGSVNDKKRALGELFGTSPAMKEIAVFLAGGKGKPQKVLGACEEGSFSLEIPDEEFEAKAETLGDGFALFEALRNIFRFTLFEKVLGGNRTISQAMIAIYKKHKSDLKSLKKLLLFYSHELYVEVLKSAKETANYVHYIGYTKPNRKKIHVAKCKTYEEFSDYLLRKLATPPADEEAHALWERVTAELREGSFLPKILHADNGTFPHQINLAELDAILSNLCRDFPVFAEKDGDGLSPAEKIRSIFKWRIPYFVGPLNPHGPNSWIVRKEGRITPWNFEEIVDLEKSNEGFIRRMTGKCSYLIAEDVLPKCSMYYQAFDVLNQLNKLRINGELISVALKQELFRELFCTSPTVTDKRIAAYLVSHGYAEKGERIVLTGKDGDFRAGMRSYCTLKKKLGSLVDEHPEVCEDIILWHTLCTDKSMVESYLLKKYGDIPAIKENIKWIKGLTLFKDFGKLSKKFLCGLYGGEDPVTQAQYTILGELYRSNNNLNELLFGEKYRFQEAILAENGAGSGEVGYDDVQALYVAPQVRRGIWQALRMTDECVAALGRAPDKIFVEVTRNDDPNNKGKRTESRKAQLLALLRDVKDIEKLREELKEKTDRELRSERLYLYFRQLGRCMYSGKKIDLGQLGSDLYDVDHIIPQSLTKDDSLDNKVLVLRTKNKEKSDIYPLPAGFSDRQPFWKFLYEAKLISGEKWARLTRTNPLTDEDYEGFVNRQLVYTNQMAKAAAELLQRKFEASGTKIVFSKASRVSEFRQKFRFTKCRETNDLHHARDAYLNIVVGNVYDTRFSSLRDYFRRKEADGTQRAIRLDTLFTYSVAGAWDKDSSLAVVRATMARSSMAVTRYPLVGKGMFYDETVYPHEDAGIGVPRKGKGPLSDPAKYGGYKSLKTAYFAIVASAGKKGKPQKTIEAIPVLIDYAARNDPEKLPAYLREKCGLREPKLLVPLLRVKSLVKVNGTPAWLAGITGSRIILHNAAQWFTDEKTDAYVKALAKLLERERAGEYSAEEKAQEVFPMHVNRLGEVKQTVDRAQNQALYDLMLRQLGKPVYGGISGAVSFRNTLNSRREQFAALPVLKQAKVLIQIAKFLKCNAESADLTELGEGANCGLLRVGKNITDVDFRIVDQSPCGLSIRERKV

SEQ ID NO: 603 - protein, 1339 aa, synthetic construct
  REGION 1..1339: note = MG44-218 effector
MEKFYLGLDIGTDSVGIACTDENYRLLRAKRKDLWATRLSDPSSDASERRKFRTARKRISRRKERITLLQELFAPYMTDEQFFLRLKYSSLYLGDKPDGFPRFTLFADGGYTDREFYAEFPTIFHLRQRLIDCGSTDLRLYYLALHHIIKYRGHFLFDGSYSVGKRDLSALFEEFNFVAAQLSDAAPVLDVNLARTFLDIAVDPIKGMTDKKRELQKLFGESRSMKAVVTFVLGGKGKPSDIFEDCAKESFSLDMPDEEFDSLAETLGDTFALFESLRKIYKFIRLEKIFSGSKTLSQAMTGIYDKHKSDLADLKRLISKYYSHDLYCEVFKSTTQGANYVSYIGYTKPSRKKIKVKKCTSYDEFAKYLLKVLKTPPEDVEGRALWEKLTGELNARTFLPKILNADNGLFPHQLNLDELDKILSNLCRDFPAFGVKDGDGLTPAEKIRSVFLFRIPYFVGPLNPHSPNSWIVRRRGRITPWNFEKMVDLEKSNEQFIRKMTGKCSYLFDEDVLPKCSMYYQAFDVLNTLNKLRINGEPVSIRLKQELFNNLFLVEPRVTDKKIAGYLISHGYAGKGERLELSGKDGDFKASMRSYITLKGKLGEFVDRHPEICEDIILWHTISTDKSLVEAHLLKKYSAYREITENIKWIKGLTLFKDFGRLSLEFLTGTEGGEAPDGRKYTVLSELYRTNFNLNEILFGERYSFSKAIAEHNGVNDGEVGYSDVQELYVAPQLRRGIWQSLVMVDEYVKALGRNPDKIFVEVTRQPSGDEPKRRTVSRKEQLSALLETVDGIDDLKNRLKERTDGDLKSERLYLYYRQLGRCMYSGASIDPLKLNSDLYDVDHIVPRSLVKDDSLDNKVLVLRSKNVEKSDIYPLADGFSDQLPFWKLLREKQLISDEKWARLTRREPLTDEDYEGFVNRQLVYTNQMAKAVAELLNRKFGASGTKIVYSKAANVSAFRDKFGVPKCRLTNDLHHARDAYLNIVVGNVYDVRFTRLADYFRRRESDGSQRRIDLDKLFTYDVPGAWDSSSSLSVVLSTVARTSMAVTRYSFIDGGEFYNQQPCGKKDGGIGAPLKGKGAVSDVLKYGGYKSLTTAYFAIVRSKDKKGRTIKTIEAIPVLVDYNAHKDVQKILTYLKEKCGLADPELLVPCLRKKSLVRINGSPAYIAGITGSQIILHNAVQWFADKKTDEYVKALGKLLDSEKTRKSEDLSDEVFVMHTNRFGEVKLKIDREQNLELYQKILKQLSKKIYGGISGAVHFRAVLQNAENKFASLTVFGQSKVLIQILKFLKCNAETSDLTLLGEGGRCGTLTINKNITDLEFSVVHVSPCGLDEKERKI

SEQ ID NO: 604 - protein, 1339 aa, synthetic construct
  REGION 1..1339: note = MG44-219 effector
MKKFYLGLDIGTDSVGIACTDENYNLLRAKGKDLWAVRLFDQSNDASERRSFRTARRRLARRKERITLLQEIFAPHMQDEKFFLRLKSSALNIEDKPDNLPKFALFADEGYTDKQYYAEFPTIFHLRQKLIDGGSADLRLYYLALHHIIKYRGHFLFDGSYSVERRNLSALFAAFNAVSAQLFDDAPLLGESRAEDFLNIAIDSTKRMNDKKRELAILFGDSRRMKAIATFLLGGTGKPSDIFDDCDEKSFSLDIPDEEFEAKAETLGERYELFESLRKIYKFVRLEKILDGCQTLSQAMIKIYDKHGSDLAVLKELIAKYYSHDLYCEVFKSTAQKANYVNYIGYTKPSRKKINVKKCNSYEEFAKYLLKVLATPPAAAEGRALWERVTGELEAGSFLPKILNADNGLFPHQLNLEELDKILSNLCRDFPAFGKKDSDGLTLAEKIRSVFLFRIPYFVGPLNPHSANAWIVRREGKITPWNFGEMVDFEKSNEGFIRRMTGKCSYLFTEDVLPKCSMYYQAFDVLNQLNKLCINGEPISVQLKKELFGNLFLKDPRVTDKKIIGYLISHGYARKDERISLGGKDGEFKANMRSYVTFKSKFGDFADQHPEICEDIILWHTISTDKGMVERYLLKKYSAYSQITENIKWIKGLTLFKDFGRLSYKFLMELQGGEDPAGGKFTVLSELYRTNLNLNEILFGEKYSFREAIGEYNGVRDCEVGYNDVQELYVAPQLRRGIWQALLMVDEYVNALNRYPDKIFVEVTRQPSSPEAQRRTLSRKEQLLSLLETVDGIDDLRRELKEKTDGDLRSERLYLYYRQLGKCMYTGNRIDPLQLNSDLYDVDHIIPRSLVKDDSLDNKVLVLRSANREKSDIYPLSEGFTAQAPLWKLLREKQLISDEKWARLTRRNPLTDEDFEGFVNRQLVYTNQMAKAVAGLLERKFGDKGTKIVYSKAVNVTEFRHKFDIPKCRETNDLHHARDAYLNIAVGNVYDVRFTRLSDYFRRRECDGSQRRIDLDKLFTYDVDGAWDKNGSLAIVRSALSRTSISVTRYSFIEGGAFYNRTVYPKDDGGVNAPLKGKGAIADFKKYGGYKSLSTAYFAIVRSKDKRGNHIKTIEAIPVITDYVAHGDKDKVLRYLTDKCGLIEPELLLPCMRIKTLVKVNGFPAYIAGISGSKILLHNAVQWYTDEKTDRYVKALGKLLEREKKGEIVNAGDEVFVMHTNRLGEIRFKIDREQNEDLYEAILHQLSKKVYGGISGAVYFSSTLQNKADKFKSLTVLEQAKTLMQIVKFLKCNAEAANLNLLDEGSACGKLGINKNITGVDFEVVHSSPCGLDEKVRKV

SEQ ID NO: 605 - protein, 1404 aa, synthetic construct
  REGION 1..1404: note = MG44-220 effector
MGLILLVKKNKAEWYLGLDIGTNSVGFSATDLEYNILTKGGKLQCGARLFKDAQDASTRRLFRSTRRRMARRKVRIDLLQEIFDPVVSQKDASFFIRLNESDLHLEDKSVKSDYPLFNDKGFTDKEYYKKFPTIYHLRYHLLNNEEKDIRLIYLACHHLIKYRGHFLFPNFNTNRGCSGFENKLKEINEFLLEQSFEKLFVENNLENSLDSIINDKSKSDKQQWDEIKEKLNPTNDKKLNSVFTAIRGNKISLSKIWEDLDEAEKEIKEELKDFKFSSDKYEECLIHAEEILNDDQLTLLELLKQFYDLIQLNRIVAGSSSIAEAMVHRYEEHKADLKLLKKFIKTHLPDEYDKMFRKNIDFVDKGHIHASYVNYVGSNITHNRKSTSHSTMCVDKNKEPVTADYSDFLKYTKALLEKAGNVAKTSEEYLILLDKIEQESLCKIHNTQENSYIPYQLQEAELKAILKKQQNNFEFLKKEAGKILSLLTFRIPYYVGPLNEAHKDIPDKFAWIEKLPGFEKQKVLPWNFEKVVDAAKSGENFITRMTAKCTYLPSEDVIPKQSLLYQKYMLFQDLNNLKINGNRITQDLKMFLYNSICQKETSLTKTKIKKHLENHGKITKKDSVGKENENDLAFNSSISSYIKLKNIIGNSMNDEMCENIIKWHTVFGDEKRPVQARIKRQYGKELSEEQIAKLSKLSFKGWARFSSKFLNGITTTDQTTGETGLTIIKILEETTQNLIEILNSDNYFEKFQDIVEKEMQKLRREEIDYGYVSDLYCSPTVKRSIWQAVLISKELMKINGGPPSKVFIEVTRGTDKKQKGKMKSSRRKQIENILDKMPKETSDLTTLKRELAQKKDEKEFRSDRLFLYFTQLGKCMYSGEKIELSDLNNYNLYDIDHIYPQSKIKDDSLTNRVLVKRSANAHKSDTYPIEYSIQKERKDFWSFLRSKNLITNEKYNRLICSQPLTQSIIGGFINRQLVSTNQAVKETTKALRILFGFSTDSRKIVYSKAANVSEFRNTYDLIKSREVNNLHHAHDAYLNIIVGNVWDSVYGRYWSDNFTFNENNALDRLFKYDHKEAWKVSYIEKIKAYLFDNKKYLDKFLITTRPFEKKGEFYDQTIHPKGKAQFELHKGYDTEKYGGYKNANTAYNCLIEYDGKKDERVRGIFSVPVRFAHLKTNELLAQIAEENGITDKKPKVLMPKIQLFSVLEVDGIRYHMRSGISDNKLQCSVTVEWYPDKDIIQIVRDIFKFKKLIDDKNFSKETVEEWKETPHDIEFATRERNKNIKEGKKISRENNLKLYDAIIEQIKKPFYQNYPTGKKVREEKILREKFEILKTFSQMEQLVELLNVITMNKANADTTNIGGVKYDECKYKISGCNNVTSKNIILITQSPTGLFENKIAINLK

SEQ ID NO: 606 - protein, 1386 aa, synthetic construct
  REGION 1..1386: note = MG44-221 effector
MKKQNNYYIGLDLGTNSVGWAVTNEKYELLHLKRKPAIGVNTFEKAKTAEQRRNYRSTRRRLARRKQRVLLLQTFFAEEVAKKDPTFFLRLNNSPYFKEDKHHSLQDTKFSLFNDKDFTDKDFHKKYKTIYHLQNDIISQPDKKFDIRLVYLAVHHLIKYRGNFIKQDENINVAEFTNSLVTDAFQELAHYFEDTDLIAAQNFFVNENVRKYEAIVSDKTNGGLKRATDKIFEQFEIKDKTLKTLLSLALGKVTRLNQIFSDEIVDDEQGKITIDFKSISYEEKYNDIKTVIGEVNIVLIDELKRLYDYFVISRLMDGKTLVAEAMVEKYEKHRSDLALLKKIFREHASKEDYRKVFTTLYTTDDKGKKKVITDVNYPRYIGKKSPYVIVKKGDYADFKKFLNKMFKDLGLLSLNDVIKVQEGLDDETFLPLINSKDNATIPYQFNEYQLRLILENQSKYYKFLNEKVDESSLTTLEKIMSIISFKIPYYIGPLVAEDNHPFAWVKRKSFEKVTPWNFSDVIDEATSASRFIERMTNKCTYIPTEDVLPREAILYQEYLALDVLNNLKINGEAIDNYAKQTLLTALYSNKTPLTKKRIATILAKNKNDVVAVSGIDDDVKLAFTSLHKFKAILGENQDLTIEDMEKIIFYRTIFTEQKMFNKKVDELLGHRLSEELCKKIKQLKFKEWSRFSNAFLTGFSKTLNKPVLFDEKTGEVISIIDIMRNNVLSLQQVIHHEKYGVLEALNKYNESMKTNENAFEDVYNLYLSPSVKRPVIKAIHLVDEIIKANDNKLPKKIFLEVTRHDDFARKGTKTISRKKQLDDLYKIAVKESKDLKDLMDELNKKTDADLRSRKLYLYFLQHGKCLYTGNPIALENLVMGDYDIEHIIPQSLITDDSLNNICLVESNINKAKGDVYPLPRTIVNVEKMKPFWERLMKRGFMSESKYQRLIRMSELTEEERFSFINRQLVETSQANKAVAKILEDRYGKGSVVYSKAQRVSDFRHKFKLLKQRDLNKAHHAHDAYLNIVVGNYNDAQTRLAYINKQTGKNFKFNPATAFEEKSFLDVWDKKSNLATIKAVLSRKNILFTQGTYISKGEFYDQQLSPAGEGKLTPVKESGPLSDTTKYGGYSSLNTSHFALVEIPKKRGSERRLIQVTRLHFAKIASGKMTLEEYLITYVGLENPKVIIDVIPLNSLIKRGKTIRSISGFDSGNTLIAHNHQEPFFSKDIEDSYYYLNRYLREIELREKEDTELLTSNEPYTIIIGNRNEKEKVQKIVISKESNEKTYLELAMHFAKDIYEHIFRGVNDTLLSNLDNFKTKSIYEQANIIKQLVMLLQTGALPASINLTSVGLNKSINRNRNINLIEKGDKLLIQSITGLYDKEICLA

SEQ ID NO: 607 - protein, 1386 aa, synthetic construct
  REGION 1..1386: note = MG44-222 effector
MEKKFYLGLDIGTNSVGWALTNENYELVHLRGKSAWGVHLFEEAKTAEQRRLYRSARRRKARTKRRINLLQELFAKEIVKVDPLFFIRLNNSTFFAEDKDKMLLGRKDSLFSDTKFSDKDFHKLYKTIYHLQKELIEDKKTKFDIRFIYLAIHHLMKYRGHFVLEDQDINVDQFGIHQIEEGFEKLKDFFALDLKTKELFNNENISGFYKVVEEVRGVNNTKRALRTLFETKNKLVNNILDFIASGESKAGKLFLNIELNEEDEQLPINLSSDEYENQYNVIENIVGEEVIVIDAAKQLYDYMIVARLMDGEKFIAHAMVRKYNKHRDDLKKLKKVIKEFCGQEEYNSFFKDEKAKDNYCAYIGMTKIKGVKKSVNKITSAKEISDFYKRIKSLLVNVESRDADEIREDIEKGIFLPRIISVDNAKIPNQFYAYQVDKILQNAKKHYSFLNKIENNLTIKDKILKILTFRVPYYVGPLSDLNNVNLTKGGFSWVVRKTNETVLPWNMDKVIDLDKTAEQFILNMTNKCTYLIGEDVLPKQSLLYEEYNILNHLNVIKINDNRLTKEEKDELIENVFKKRVNVTYKAINDYFTNRLKKDVKVTGFDVDVKISLSSYHKFNKIFKDRINNEPQNAELIRNLERVVLLGTIYSSPSDFAKRVKNNIQFKEFFKEDELEKISRLRFNGWGNFSRLLLAGYDSTSKTIAPNQSLTYKDEKTGNELSIIEIMREEPLNFNEVLYHEKYHFNDLIKRLNENKDETLDVDELIDSYYLSPAVKRSIKRTTKIVDELIQINDGIIPDKIFVEVTREDEAKRKGKGRTKSRLENLRAIYKNAIKDADEYRVLAKQLDNQSLDDAYLRPKKIYLYYLQNGKCAYSGEPLDLTKCDIDHIVPRSLVKDDSFNNLVLVKEEENKLKGDKYPIRMDVIRKQKPFWNQLRKNGLMSNEKYEKLTRTKELTDEDLQGFVNRQLVVTNQANKAVAEILKKLYGNATIVYSKASNVTDFRQQFNIIKGREINNVHHAHDAYLNIVVGNYFHTRFGSRYYYAKAKDKKWNPKKVFTYSISGCWDKERDISTIKKMLKRRDVLFTRMPEIRSGEFYDQNAIKANDGLIPIKEKGPLSDTSKYGGYSGKTAAYFTIVEHTIKNKRERILVSMPIIINQKIKQGHTTFIEYLENVLNLVEPSVLYSPIPFNTVFKRGQSLQYLTGSTGDFYQIIMRNMIEPYFDEFTFEYLCLIYKYFEQLEIRSNRKKMNENEMQSLKEIQVIFSSNEKRRQNENRLRFITLEKNKIVFENLIKQIAKPIYEKSFGKRRDIIISNKDQFYKLGLERQIEVISNLHRFIKSGVPGRIDLEELGVKSGNLTMNYKIEDLSIIKQSITGLYQKEIIIKQV

SEQ ID NO: 608 - protein, 1334 aa, synthetic construct
  REGION 1..1334: note = MG44-223 effector
MKKFYIGADIGTNSVGVACTDESYRLIRAKSKDCWAVRLFDEGETAFDRRTKRTARRRLARRKQRINWFQELFEPFIDDKTFFIRLNNSQYLPEDKDSLLCGNKNNLFENEGEESKFYKKYPTIYHLRKALMDGGNFDIRLYYLALHHIIKYRGHFLYEGSIEDIRDFSNLMKGLDCAIADSYDGGLNLFDSVDSAKVRDILIDKKSGLRDKQVELEKLLCAKSKREKEILKGITGQKISPYVLFGDEFKEEKSFSLNDMSDEEFESKRSSYGESFTLLDLMHSVCNYVKFEKIFEGHSDISSAMISVYEKHKADLVLLKKVVRKQSKEDYNKIFRSVNEEKNYVNYIGYTSKDGRKIKVKKCKDEDFFKYLKKYLNGILNEDNFDIVSKIIKEIDDRIFLPKILHSDNGLFPKQVNEFELKKIIENMVRNYAETEEMASAVLSLFNYKIPYYVGPLTGCNSWVVRTDEKVTPWNFDRVVDLAKSNEAFMRRMTNKCAYIKGEDVLPKASIIYQKYDTLNQLNKLRINDRVISIELKQTIYNELFLKYPKVTDKKIKELLVREGLCSSSETKDITISGKDGDFKSSMSSYIRLKNILGDFVDDDLKSGGKVCENIILWHTLNTDKKIVEDLIEKNYGFIPEIKANIKQLKGLTFNDFGRLSAKLLIGIEGVDKTTGQILTILDVLYQTNQNLNEVLNNESYNFSEIIDEENGIETEIISYETVEELYVSPAVRRGIWQTLLMIDEYVNAVGRQPDKIFIEVTRNDGKKGDNGRTQPRKRQLQEKFKNIGSAYSDIIEELSEEKYTDLKLRQERLYLYFRQLGRCMYTGERIILDELNGNRYDVDHILPRTYVKDDSLDNKVLVCRGANATKADTYPLPTEFSRKEVRAHWKMLLDKDLISKTTYDRLTRIEPLKDDDYNDFINRQKTITDQTAKAVIELLKRKYPNAKLIFSRAKNVNDFKNRFNLFKCRETNDLHHARDAYLNVVVGNVFDSVFSTPLGQSRKDGDVWRIYNLKKLFTRDVIGVWSKDSIKVVKDTYSKPSMSVTRYATCNKGKFYDETVCRKDDSAITAPRKGKGPLSDVTKYGGYTTQKTAYFAIVTSVDKKGKSIKTIEAIPVLVTYKLKTDTNAIQKYLESYLREPIIVIPKVKVKQLVSYNGSLCYLAGTTDNRITVHNASQLYTDNTTDEYVNELIKIIGMSDNGIITGNESQYITKTNKDGVIRIVVNKENNEKLYETLKNKLDSKIYKGLSAFASFKTNMERGKDKFCELSVLEQAKVLLQILKVFRCNAEISDIQAIGGTAHSGKKLFAKNITDVDFKLVNLSPAGLTVRIRKV

SEQ ID NO: 609 - protein, 1505 aa, synthetic construct
  REGION 1..1505: note = MG44-224 effector
MNNEKKSSSEGKKTYFGLDLGTENIGFAVTDDEYNIAKVNGKNALGILTYSSKQIEAQSASARRAFRTTRKRLQRRKFRISLLQELFCGAMMKKDKNFFVKLNENDLQAADKTVNEGKYSLFNDKGYTDVDYYKEYPTIYHLREELSRKATTDIRKLYLAVHNIIKYRGHFLINGGLSECFDIAPVFAMLNDELDERNIDTEEMKDYKKIDMLSNFEKDKFDKIIIDANMRKKDKKIQTCLLLKAETAQQKKLVEIMYGGVINVSALFGEGAYPNKSIENFYFDEKYEQIEPQLVLELEERDYRIICQLKKIRDYITLTTILKGKESISSAMIEKFNKHKRDLKQLKELAASYEGNYYEEMFGLPLGNKDEEMSDSPLGKEDEEMSDSPRDKENKVVRNNYVAYVGGGRSKDGKKAFNNRLGKTCSRKEFYTFLNKYLDKLTEKDKTENAEIIASIKADIEDDVYMPKVISKDNSIIPHQLNALELEKILKTAADSGYYDWLKKTDDGMTVSDKIKSLLEFRVPYYAGPVKFYRKGEQRSKNSWIVRKEGRITPWTFDKLVDKNACNEEFIKRMTNSCTYLKNENALPKNSIVFKKFLALSELNKLKVNGELMSVELKREIYDKIYLKNGKPTIAKIKKLLKSKGVEVISVSGFDEELKESLNSYHIIRNIIGDKIDKFPLMAERLVFLMTIHNDSGMLETSIKKEFGDKLSKDEIKLLKGVTFSGWGRFSLKLLAGNLFDDGILLTDSTGEMRDIITILEETNLGLMEIVHSKNFNFAEVLKEYYDDAGYNDDERDVTYEDVEEMYCSPAVKRSVWQAFGLVKELVKNTKTIPDKIFIEVTRKKEPNKGKVPSRKKKIEDLYKKLKEDKNDMYLSELQELGTKLKNIDNGILNSEKIFLYFMQLGRCAYSCKPIDLGENFSNLSNYDVDHIIPRAKKKDDSLDNKVLVTSTLNKDKKDVYPVPAEYRQNADALWKTLLKAGLMTKEKYERLARKTPLTRLEEESFINRQLVETSQTALLLRDLLEKWFAYKIKQEASVGDGDKNKKADIIFVKASNVSDFRKKFSLSKSREVNDFHHAADAYLNIVVGNVLNEKYNHGIDYVSEDKESANFVKTFENNVKSYKEKRYVWVNDKNYCTICKIQKQLDTNDYAVSRKTVTAKGELYNSTIYKAEKWSNKKGAERYPMQESKLDEKGNELHPRSDTYRYGNYKSSGTAYFVIIDSLDKAGQKQRSIEAMPIFYDKKVQNGQMTILEVFEKLGLIKPEFAKIKGLPKPILKMGSLIEMDGARLRIAGMTGNEITLHNANQLYVTNEINNYVKELSIMHEKAVKTAAHIPQDELKGKTAEKKSEPKINTQDLAFRALEEEKRRRKEVNEKTKIIFITKENNLKVYEFLAKKAASHPFIGVPRYDPFRDALALGKQSFVDMDEYRQLRVILKILPAFQCNALKVDMSDLNWVEEKNGIMKTVSGKKTTCNIRINKKITDKRITLIYQNKTGLKEQRFLLT

SEQ ID NO: 610 - protein, 1505 aa, synthetic construct
  REGION 1..1505: note = MG44-225 effector
MNNEKKSSSEGKKTYFGLDLGTENIGFAVTDDEYNIAKVNGKNALGILTYSSKQIEAQSASARRAFRTTRKRLQRRKFRISLLQELFCGAMMKKDKNFFVKLNENDLQAADKTVNEGKYSLFNDKGYTDVDYYKEYPTIYHLREELSRKATTDIRKLYLAVHNIIKYRGHFLINGGLSECFDIAPVFAMLNDELDERNIDTEEMKDYKKIDMLSNFEKDKFDKIIIDANMRKKDKKIQTCLLLKAETAQQKKLVEIMYGGVINVSALFGEGAYPNKSIENFYFDEKYEQIEPQLVLELEERDYRIICQLKKIRDYITLTTILKGKESISSAMIEKFNKHKRDLKQLKELAASYEGNYYEEMFGLPLGNKDEEMSDSPLGKEDEEMSDSPRDKENKVVRNNYVAYVGGGRSKDGKKAFNNRLGKTCSRKEFYTFLNKYLDKLTEKDKTENAEIIASIKADIEDDVYMPKVISKDNSIIPHQLNALELEKILKTAADSGYYDWLKKTDDGMTVSDKIKSLLEFRVPYYAGPVKFYRKGEQRSKNSWIVRKEGRITPWTFDKLVDKNACNEEFIKRMTNSCTYLKNENALPKNSIVFKKFLALSELNKLKVNGELMSVELKREIYDKIYLKNGKPTIAKIKKLLKSKGVEVISVSGFDEELKESLNSYHIIRNIIGDKIDKFPLMAERLVFLMTIHNDSGMLETSIKKEFGDKLSKDEIKLLKGVTFSGWGRFSLKLLAGNLFDDGILLTDSTGEMRDIITILEETNLGLMEIVHSKNFNFAEVLKEYYDDAGYNDDERDVTYEDVEEMYCSPAVKRSVWQAFGLVKELVKNTKTIPDKIFIEVTRKKEPNKGKVPSRKKKIEDLYKKLKEDKNDMYLSELQELGTKLKNIDNGILNSEKIFLYFMQLGRCAYSCKPIDLGENFSNLSNYDVDHIIPRAKKKDDSLDNKVLVTSTLNKDKKDVYPVPAEYRQNADALWKTLLKAGLMTKEKYERLARKTPLTRLEEESFINRQLVETSQTALLLRDLLEKWFAYKIKQEASVGDGDKNKKADIIFVKASNVSDFRKKFSLSKSREVNDFHHAADAYLNIVVGNVLNEKYNHGIDYVSEDKESANFVKTFENNVKSYKEKRYVWVNDKNYCTICKIQKQLDTNDYAVSRKTVTAKGELYNSTIYKAEKWSNKKGAERYPMQESKLDEKGNELHPRSDTYRYGNYKSSGTAYFVIIDSLDKAGQKQRSIEAMPIFYDKKVQNGQMTILEVFEKLGLIKPEFAKIKGLPKPILKMGSLIEMDGARLRIAGMTGNEITLHNANQLYVTNEINNYVKELSIMHEKAVKTAAHIPQDELKGKTAEKKSEPKINTQDLAFRALEEEKRRRKEVNEKTKIIFITKENNLKVYEFLAKKAASHPFIGVPRYDPFRDALALGKQSFVDMDEYRQLRVILKILPAFQCNALKVDMSDLNWVEEKNGIMKTVSGKKTTCNIRINKKITDKRITLIYQNKTGLKEHRFLLT

SEQ ID NO: 611 - protein, 1334 aa, synthetic construct
  REGION 1..1334: note = MG44-226 effector
MKKFYIGADIGTNSVGVACTDESYRLIRAKSKDCWAVRLFDEGETAFDRRTKRTARRRLARRKQRINWLQELFEPFIDDKTFFIRLNNSQYLPEDKDSLLCGNKNNLFENEGEESKFYKKYPTIYHLRKALMDGGNFDIRLYYLALHHIIKYRGHFLYEGSIEDIRDFSNLMKGLDCAIADSYDGGLNLFDSVDSAKVRDILIDKKSGLRDKQVELEKLLCAKSKREKEILKGITGQKISPYVLFGDEFKEEKSFSLNDMSDEEFESKRSSYGESFTLLDLMHSVCNYVKFEKIFEGHSDISSAMISVYEKHKADLVLMKKVVRKQSKEDYNKIFRSVNEEKNYVNYIGYTSKDGRKIKVKKCKDEDFFKYLKKYLNGILNEDNFDIVSKIIKEIDDRIFLPKILHSDNGLFPKQVNEFELKKIIENMVRNYAETEEMASAVLSLFNYKIPYYVGPLTGCNSWVVRTDEKVKPWNFDRVVDLAKSNEAFMRRMTNKCAYIKGEDVLPKASIIYQKYDTLNQLNKLRINDRVISIELKQTIYNELFLKYPKVTDKKIKELLVREGLCSSSETKDITISGKDGDFKSSMSSYIRLKNILGDFVDDDLKSGGKVCENIILWHTLNTDKKIVEDLIEKNYGFIPEIKANIKQLKGLTFNDFGRLSAKLLIGIEGVDKTTGQILTILDVLYQTNQNLNEVLNNESYNFSEIIDEENGIETEIISYETVEELYVSPAVRRGIWQTLLMIDEYVNAVGRQPDKIFIEVTRNDGKKGDNGRTQPRKRQLQEKFKNIGSAYSDIIEELSEEKYTDLKLRQERLYLYFRQLGRCMYTGERIILDELNGNRYDVDHILPRTYVKDDSLDNKVLVCRGANATKADTYPLPTEFSRKEVRAHWKMLLDKDLISKTTYDRLTRIEPLKDDDYNDFINRQKTITDQTAKAVIELLKRKYPNAKLIFSRAKNVNDFKNRFNLFKCRETNDLHHARDAYLNVVVGNVFDTVFSTPLGQSRKDGDVWRIYNLRKLFTRDVIGAWSKDSIKIVKDTYSKPSMSVTRYATCNKGKFYDETVCRKDDSAITAPRKGKGPISDVTKYGGYTSQKTAYFAIVTSVDKKGKRIKTIEAIPVLVTYKLKSDTDAIQKYLESYLREPNIVVPKVKVKQLVSYNGSLCYLAGITNNQITVHNASQLYTDNTTDEYVNELIKIIGMGDNGIITGNESQYITKTNKDGVIRIVVNKENNEKLYETLKNKLDSKIYKGLSAFASFKKNMERGKDKFCELSVLEQAKVLLQILKVFRCNAEISDIQAIGGTAHSGKKLFAKNITDVDFKLVNLSPAGLTVRIRKV

SEQ ID NO: 612 - protein, 1337 aa, synthetic construct
  REGION 1..1337: note = MG44-227 effector
MEKFFLGMDIGPNSVGMACTDEKYKLLRAAGRDCWAVRLFDESHTAAERRVARTARRRLERRKQRIGFLQSLFALLIEDKTFFIRLNNSQYSAEDKSAALNGDVNNLFSDDGFKDKDYHKKYPTIFHLRKALMSEPVTDLRLYYLALHHIVKYRGHFLFEGSMAEFHDASKLFEKLNAVCVDLYEERAPLFDTSKVSSAKEILLQRGKDREKRLIEFFAANDGVSKEIIKGICGYKISPQKLFVGRYKEEKSFSAEELSDEAFDALQATFGDDFALLESIRSVCNYITFERLLSGNSDISSAMIALYNKHAADLALLKKYIREHGTQEEYNRFFKFTGENSNYVNYIGYTKKGGDKKKVKICGREEFYRYTKDFLKKLSDDVNEDLERINNEIENKIFLPKILHADNGLFPYQVNEDELKKIIDNMVKNCPQTAGMAKAILPVFLYRIPYYVGPLTGKNSWAVRKEGKENEKVTPWNFKDVIDEAKSNEGFMRKMTGKCSYLYAEDVLPKFSVYYQSYNVLNQLNKLKINDCPISVELKQKIFKELFLTKKKVTDNAIKDLLVRCGKISESEKKSVTISGKDGELSVTMSSYIQLKTILGEFADEDLKNGGGVCENIILWHTLNTEKRIVEYLIMKNYGDTPVIAQNIKALKGLVFKDFGRLSKKFLCDIRAVDKETGELLTVTDILYRTNNNLNELLFSEQYNWQEVIRKENGEITDEITYEDIEKLYVSPAVRRGIWQSLKMADEYVRKIGKTPDKIFVEVTREDGVKGEAGRTISRKKQLQEKYKGIEGIADLTAELNEKTDLDLRSERLYLYFRQLGECMYSGERIEDLSTLSTDRYDVDHILPRTYIKDDGLDNKVLVLRSKNAEKTDVYPIPYGLVTAEARKHWQILLKKGLISDTTYKRLTRTEPLNDDDYGDFINRQKTITDQTAKAVIGLMAKKYPSAKMVYSKAKNVSDFKQKFNLHKCRETNDLHHARDAYLNIVVGNVYDTCFTTPMALFNKDGDKWRTFNLKTMFTRTVKGAWEQENNQSLLTVKKTYAKTSMSVTQYAYCFNGEFYDQTIYGKEDTGITAPRKLNGPLSDTSRYGGYKSQNTAYFAVVSSKGKKEKTIKTIEAVPVMVSYKAKNDPNFLQRYFESYLHQPVVLIEKLKKKQLVSYNGTLCYLAGVTGERIIVHNAVELFTDNKTDEYVNALGKLSDMEKNGRIDTQQEEYVIKTNRLKEVKLTVNRKDNIALYDYLLEKLNDKRYFGVGSFLSYYRTLLKAKEIFDTLSVLKQAATLLQILRFFKCNAETSDLSTIGGSNRSGTIRINKDITETEFSIIHRSACGLTERRQKV

SEQ ID NO: 613 - protein, 1416 aa, synthetic construct
  REGION 1..1416: note = MG44-228 effector
MEEIYLGLDIGTNSCGYAVTDGNYNLVRIGGKDAWGVRLFEKAETAQERRAKRTARRRVVRKKLQNLWLQQLFEKEIEKIDPSFFTRLKYSNLHLEDKILSDKNLTSKYSLFNDTVKQVFTDKEYYEKYKTVYHLREKLLKNPAEDVRLLYLAIHSILTHRGHFLSETDFSSNVPIEDSFNNLLDKLSAYSVEFNDGKNVLTIKPDKISGIFLLLEDFSQGLSYRQVKENFEKNLDVKTKLDKTVASILLSGKFKTTDVFAVEKEDAVKVDFNDEKFEEVYGTLSGQLSETELAILNLFKDLYSSIQLKKLLGKNDYICEAMVERYDKHNEQLKELKTFVKTYFPSKKNLVFNAQKTSKKKKEEKSGKIANYAAYCYSYLKDGKKQIIDGVASREDFYKFIKNELLECSPEVETDLNKFEEQKQKILNSIEKNDYLLKIRSHDNIVLPNSLYKVELQQILKINEKKFKFLSEKDEKGKTISEKIIDIICFRIPYFVGPIGQSERGWIRKDKNLDFKPWTLNEIINFDEAEDKFIQNMTSKCTYLPTEDVLPKDSLLYSKFRVLNELNNLKVNGNDITVETKQRIFKGLFEKYKKISKNKLIEFLKQENIYPKNESIVITGIDNEFANTYSSYVTLANKFGEEFVNKNYDVFEKIIKYHTIISDKLRLEKRIKREFKIFSNEDVKFLKSLNYSGWGKLSGKFLNGIKFADKKSNSPEFESKTIISAMWETNKNLQEVIFCKEYNLLEKLEANIEKIQRDLVYEDVQNMYTSPSVKRGAWQAISIINELKSKLGKYPDKIFIEVTRNDQEKGDKGRKDSRFGAVVKKYKDKALKEDCLKEAINYNNLLDELNKRNNSHLRSEKLFLYFMQLGKDAYTGEPIDIAELGNDNAYNVDHIIPRSKVKDDSLDNKVLVSAAANLAKGDEYPLKRKIQFAQKDFWRMLNKNGLMSDKKLARLERTEEFTDKDADDFTNQQLVSTNQESKAVIDLLSKVYDNRRNIVFSKAMFVTEFRNRYNIFKSRDVNDLHHAKDAFLNVVVGNVLFNRFTQGYWKKDKNIKILEDKNRVDADEDKNEKVTSVVDKVFGRYVWSNQTGEVVWKGWKDVERIQKICYQNSPIISIMPYVNRNGAFYDETIYKKKNDGEKFKAAFALKEKGPMSSIEKYGGFNSVNNAYFMVVESVDSKGRIKKTIECVPIIVEYKYRNDPDKKQKIIKFIEETNNIKITRVIKDELKFRSVLKINGGLYMLTAKTSDSFKVLKLNQWYISNSDTGYIKILEKYKNMPQVAKECLKEDGERLIVSPAVKENSRPQIITRTQNVELYDLIINQLSKKIYDLSSIKAIVSNLKDKRDLFIALSIPNQTEVLLNLVKYVGGGYLADLKLLGGTEHMGTTRISKDITDLNIYLIEQSVTGLYSKGTKL

SEQ ID NO: 614 - protein, 1334 aa, synthetic construct
  REGION 1..1334: note = MG44-229 effector
MKKFYIGADIGTNSVGVACTDESYRLIRAKSKDCWAVRLFDDGETAADRRTKRTARRRLARRKQRINWLQELFAPFIDDKTFFIRLNNSQYLPEDKDSLLCGNKNNLFENEGGESKFYKKYPTIYHLRKALMDGGNFDIRLYYLALHHIIKYRGHFLYEGSIEDIRDFSNLMKGLKCAISDSYDGELNLFDSVDSAKVRDVLIDKKSGLRDKQVELEKLLCAKSKREKEILKGITGQKISPYVLFGDEFKEEKSFSLNDMSDEEFESKRSSYGESFTLLDLMHSVCNYVKFEKIFEGHSDISSAMISVYEKHKTDLVLLKKVVRKQSKEDYNKIFRSVNEKENYVNYIGYTSKDGRKIKVKKCKDEDFFKYLKKYLNGILNEDNFDIVSKIIKEIDDRIFLPKILHSDNGLFPKQVNEFELKKIIENMVRNYPETEEMASAVLSLFNYKIPYYVGPLTGCNSWVVRTDEKVTPWNFDRVVDLAKSNEAFMRRMTNKCSYIKGEDVLPKASIIYQKYDTLNQLNKLRINDRVISVELKQTIYNELFLKYPKVTDKKIKELLVREGLCSSSETKDITISGKDGDFKSSMSSYIRLKKILGDFVDDDLKSGGKVCENIILWHTLNTDKKIVEDLIEKNYGFIPEIKANIKQLKGLTFNDFGRLSTKLLIGIEGVDKTTGQILTILDVLYQTNQNLNEVLNNESYNFSEIIDEENGIETEIVSYETVEELYVSPAVRRGIWQTLLMIDEYVNAVGRQPDKIFIEVTRNDGKKGDNGRTQPRKRQLQEKFKNIGSAYSDIIEELSEEKYTDLKLRQERLYLYFRQLGRCMYTGERIILDELNGNRYDVDHILPRTYVKDDSLDNKVLVCRGANATKADTYPLPAEFSKKEVRAHWKMLLDKDLISKTTYDRLTRIEPLKEDDYNDFINRQKTITDQTSKAVIELLKRKYPDAKLIFSRAKNVSDFKNRFNLFKCRETNDLHHARDAYLNVVVGNVFDTVFSTPLGQSRKDGDVWRIYNLKKLFTRDVIGAWSKDSIKIVKDTYSKPSMSVTRYATCNKGKFYDETVCRKDDSAITAPRKGEGPLSDVTKYGGYTSQKTAYFAIVTSVDKKGKRIKTIEAIPVLVTYKLKTDTNAIQKYLESYLREPVIVIPKVKVKQLVSYNGSLCYLAGITGNQITVHNASQLYTDNDTDEYVNELIKIIGMGDNGMITGNESQYITKTNKDGVIRIVVNKENNEKLYETLKNKLDSKIYKGLSAFASFKTNMERGKDKFCELSVLEQAKVLLQILKVFRCNAKKSNIELIGGGCDSGSIKINKNITDVDFKLVNLSPAGLTVRIRKV

SEQ ID NO: 615 - protein, 1347 aa, synthetic construct
  REGION 1..1347: note = MG44-230 effector
MEKEQKFYLGLDIGTNSVGIACTDENYNLLRVKGKDCWAVRLFDEAQTAADRRTARTARRRLQRRRYRINQLQGLFAPFMQDNLFFLRLNNSQFFADDKAGELDGDVNNLFADSGFTDRNFHEKYPTIYHLRFALQQSPVDDIRLYYLALHHIIKYRGHFLYDGNVSEVRDVHKLFDTLNTVCENTFAENTPHFDIEKADEAKNMLLRSKGKLKDTVKSIKQLFSVQNDECGKIRIEIINGFCGAKFSPEKLLGDAYSEEKSFAFRDVNEDAFEAMQSTYGDDFALLKAMREIYNFVTFERLFNGQPNISSAMIAVYDKHKSDLKKLKGFIKKNYDTDGGKKCREMFSDVTQKANYVNYVGHVGYGKSRKRVKTCDYDSFIAYVKKFLMDGNFAHDETYDEIMAEIEAKTFLPKILHSDNGLVPHQVNEDELVKIVAQMVRAFPETAQMASKILPLFLFRIPYYVGPLVGSNSWAVCKSDEKITPWNFRDVVDEAASNEEFMRRMTNKCTYLHGVDVLPKCSIAYQKFNTLNQINKLKVNDCAISVPLKQKIFAELFLVKPRVSDKMIASLIVREGAVAPGDSVVLSGKDGGDIKASMSSYIQLKRILGDFVDYDLASGGNVCENIILWHTLNTDKRLVEDLIVKNYGDNPAVAPYVKQLKGLVFNDFGKLSGRLLTELDVVDKQTGELCTVTDLLWNTNENFNELMFDKRYNLEEVIAAENNDDDGKVDYEDVQKLYVSPAVRRGIWQSLQMVDEYVAALGKEPDKVFVEVSREEGVKGDKGRTHSRKKQLLEKYKNIDPKDVENIDELTGELNSDKISDMRLRQERLYLYFRQLGRCMYSGEPIDLDHINDSKLYDVDHILPRSYIKDDSLDNKVLVLRSKNAEKSDTYPLPLGFTNQQGWWKMLRAKDLISSGTYDRLMRTAPLTDDDYNDFINRQKVITDQTSKAVIELLKRKYPGATLVYSKAVNVADFKSKFDLYKCRETNDLHHARDAYLNVVVGNVYSTVFGVRIETYVKDGEKWKTYNLKKMFTRDVPGAWNENSIRTVKGVYNSSSMCVTRYAYCNKGAFYKQTVYSGNENITAPRKGKGPLANMERYGGYMTQSTAYFAIVESQGKKGRIKTIEAVPVMVDYQSRNDPDRVVKYFEENGLVDVKLIVPKIKIKQLVSYNGSWVWLAGITGPSIIVHNATELFTDNRTDMYVKQFVKLLEMAKNPTFDVNCEKYELTPNRERGEKITIDRESNIKLYDFFLSKFDCSKFKGFSSYVTFGKNLSIGREKFVALTVSQQVNVLNQIVNFFKCNAETADIELIGGSKISGKILFNKNITDVDFRIISQSPCGLTVHVKRV

SEQ ID NO: 616 - protein, 545 aa, synthetic construct
  REGION 1..545: note = MG44-231 effector
MGEAYADVIAELGDEKYDDFKLRQERLYLYFRQLGKCMYTGERIDLSNLNSDLYDVDHILPRTFIKDDSLDNKVLVSRSANAKKSDTYPLPKEFFKQSEFWKILLDKRLISRTTYERLTRKDPLSEEDFNYFINRQKTVTDQTVKAVAELMKRKFPDAKIVYSKAKNVSDFKHKFDIFKCRETNDLHHARDAYLNVVVGNVYDAVFSNPLQTYRKDGDLWRDYNLKKMFTRDVKGAWNGETIATVKKVTFKSSMIVTRYALCNKGEFYDQTVYGKDNKGITAPRKGKGPLSDFKKYGGYKSEKTAYFAIVYSVGKKGEKIKTIEPVPVLTAYRARVNPGAVEEYLKTYLTAPQILVPKIKTKQLVSYNGTECYLASLDVGQIGIYNAVQSFTDNKTDEYVNALLKITDMKAKNMIVSEDESYAVKTNRSGNDKLVVNRDKNVELYRDFKNRLSKPAYKGISTFGTFQSKLEKSEGKFISLTVIDQARVLLQILKFFKCNAEVADLTLLGDGKRCGTLRINKNITNVEVKLINYSPAGLTKKVRTV

SEQ ID NO: 617 - protein, 784 aa, synthetic construct
  REGION 1..784: note = MG44-232 effector
MEKFYLGLDIGSNSVGTACTDENYNLLRVKGKDCWSVRLFEESATAEKRRGFRTGRRRNERRKQRIGWLQALFAPFIEDKTFFIRLNNSQFFPEDKDEILGGDKNNLFGGIYDDKAFHAEFPTVYHLRERLITEGRADLRLYYLALHHIIKYRGHFLFDGGLDEVRDLGRLLEELNSVVSDLYDDAPQFDKTKADECKALLLNVSVGAKDKLNSLEKLFGTEDKVGKEILKSFAGFKISPSVLFGEEYKNEKSFSFKDMNDEAFEALRNEYADNFALLEKMRAIYGFVTFEKILAGHAGISSAMIAVYEKHKADLKRLKKFIRSERPDDYSAIFRKTDQKANYVNYIGYTSKGGVKTTVAKCKDEEFYAYLKKYLNGLTSVKDENTLKIILEEVENQTFLPKILHSDNGLFPRQVNQAELVKIVEGMVKFHPETKPVADRILPLFLFRVPYFVGPLTGKNSWVVRKNEKITPWNFDEVVDLAASNEEFMRRMTNKCSYLRGEDVLPKNSVIYQKFDVLNQLNKLKVNDCPVSVEIKKKIFDELFLVFPKVSDKRIKDLLVREGILSFAEAKDATLTGKDGEFKASMSAYVRLKKILGEFLDKDYAENGGVCENIILWHTLNTDKKIVENLILKNYGNIPVIKENIKQLKGLTFNEFGRLSQKFLTGIRAVDKRTGELVTVIEVLYETNENLNEILFDENYDFGNRIAEENGETSSEVTYSDIEDLYVSPSVRRGIWQSLVIADEYVNAIGKTPDKIFIEVTREDGKKGDEGRTVSRKKAVARKI

SEQ ID NO: 618 - protein, 825 aa, synthetic construct
  REGION 1..825: note = MG44-233 effector
MEKEQKFYLGLDIGTNSVGIACTDENYNLLRVKGKDCWAVRLFDEAQTAADRRTARTARRRLQRRRYRINQLQGLFAPFMQDNLFFLRLNNSQFFADDKAGELDGDVNNLFADSGFTDRNFHEKYPTIYHLRFALQQSPVDDIRLYYLALHHIIKYRGHFLYDGNVSEVRDVHKLFDALNTVCENTFAENTPHFDIEKADEAKDMLLRSKGKLKDTVKNIKQLFSVQNDDCGKIRTEIINGFCGAKFSPEKLLGDAYSEEKSFAFRDVEEDAFEAMQSTYGDDFALLKAMREIYNFVTFERLFNGQPNISSAMIAVYDKHKSDLKKLKGFIKKNYDTDGGKKCREMFSDVTQKANYVNYVGHVGYGKSRKRVKTCDYDSFIAYVKKFLMDGNFAHDETYDEIMAEIEAKTFLPKILHSDNGLVPHQVNEDELVKIVAQMVRAFPETAQMASKILPLFLFRIPYYVGPLVGSNSWAVRKSDEKITPWNFRDVVDEAASNEEFMRRMTNKCTYLHGVDVLPKCSIAYQKFNTLNQINKLKVNDCAISVPLKQKIFAELFLVKPRVSDKMIASLIVREGAVAPGDSVVLSGKDGGDIKASMSSYIQLKRILGDFVDYDLASGGNVCENIILWHTLNTDKRLVEDLIVKNYGDNPAVAPYVKQLKGLVFNDFGKLSGRLLTELDVVDKQTGELCTVTDLLWNTNENFNELMFDKRYNLEEVIAAENEDDNDKVDYREVQKLYVSPAVRRGIWQSLQMVDEYVAALGKEPDKAFVEVSREEGVKGDKGRTHSRKKQLLEKYKNINPKDVENIDELTGELNSDKISDMRLR

SEQ ID NO: 619 - protein, 519 aa, synthetic construct
  REGION 1..519: note = MG44-234 effector
MYLYFRQLGRCMYSGEPIDLDHINDSKLYDVDHILPRSYIKDDSLDNKVLVLRSKNAEKSDTYPLPLGFTNQQGWWKMLRAKDLISSGTYDRLMRTAPLTDDDYNDFINRQKVITDQTSKAVIELLKRKYPGATLVYSKAVNVADFKSKFDLYKCRETNDLHHARDAYLNVVVGNVYSTVFGVRIETYVKDGEKWKTYNLKKMFTRDVPGAWNENSIKTVKGVYNSSSMCVTRYAYCNKGAFYKQTVYSGNENITAPRKGKGPLANMERYGGYMTQSTAYFAIVESQGKKGRIKTIEAVPVMVDYQSRNDPDRVVKYFEENGLVDVKLIVPKIKIKQLVSYNGSWVWLAGITGPSIIVHNATELFTDNRTDMYVKQFVKLLEMAKNPTFDVNCEKYEFTPNRERGEKITIDRESNIKLYDFFLSKFDCSKFKGVSSYVTFGKNLSIGREKFVALTVSQQVNVLNQIVNFFKCNAETADIELIGGSKISGKILFNKNITDVDFRIISQSPCGLTVHVKRV

SEQ ID NO: 620 - protein, 1348 aa, synthetic construct
  REGION 1..1348: note = MG44-235 effector
MKKFYIGMDIGTNSVGVACTDEDYKLLRAKGKDCWAVRLFDEAQTAEKRRTYRTNRRRLDRRKQRIKFLQELFSPFITDETFFIRLNNSQFLPEDKDALLFGDKNNLLSGEYDDKRFHEEFPTVYHLREALINGCDYDLRLYYLAIHHIVKYRGHFLFEGSLEEARDLSRLLKDLNEVISDTYGEDSPHFCVSEVEEIKKALLDENKTLKDRQVALESLFDVDDKISKEIVKGIIGAKISPVTFFGEDKREEKSFSFKDVTDETFESMKPVYGDDFALLSAIRAIYGFVTFEKILKGYSDVSSAMIAVYEKHKKDLRLLKDFIRNESCKDYIKIFKNTKEKHNYVNYIGYTSSNGKKGNTNNGKRINVEKCKNDEEFFSYLKKYLSELPDVKDEKTRDHILSELDNGRFLPKILHSDKGLFPKQINEAELVKIVRNMVKKYPETAVIAENISVLFNFRVPYYVGPLTGVNSWAVRTEEKVTPWNFDKVVDGVKSNEKFMRKMTNKCTYLRGEEVLPKASVLYQKYDTLNQLNKLRINDRPVPVELKQKIYNELFLKYAKVSDAKIKELLVREGIFSKEEIKSVSLSGKDGEFKASMSSYIRFKKIFGEEFVDKDLAGGGNVCENIILWHTLNTDKKFVVELIEKNYGQIPQIKDNIKELKGLSFSDFGRLSAKFLNGITAIDKASGEITNVTIMDVLYDTNENLNEILSDERYNFDEAIAIINGEKGEGFSYEMIDELYVSPAVRRGIRQTLLMIDEYVEAIGNAPDKIFVEVTRENGKKGNDGRTQPRKRQLQEKIKTIGEAYADVMKELGEEKCTDFELRKERLFLYFRQLGRCMYTGERIDLGELGSERYDVDHILPRKYVKDDSLDNKVLVCRSSNEAKKAYYPIPANIVNPKVREHWKLLLEKGLISKITYDRLTRTEPLNDDDFKDFINRQKVITDQTAKAVIELLKIKYPDTKLIYSKAKNVNDFRNKFDLYKCRETNDLHHARDAYLNVVVGNVYNTYCAQMQELLKKGGIEKEYDVDEIFSRNVRGAWKYGYDLKTVKNTFMKLSMTVTRHATCNKGMFYDETVFKRDDKGITAPRKNSDPLADTAKYGGYKTQKTAFFAIVSSVDKKGKRIKTIEAIPVLVSYNMKNDPDAEMKYLVDVLKLNDPVLIVPQVKVKQLVSYNGTRCYLAGITGNQIIAHNAIQLFTDNKTDEYVRELVKLLGMKGNKSVDENASEYPTKTNRLGEVKCVINRENNEKLYRMLKEKLSEKMYSGLSSAKTFGRNLETSEEKFVSLSVMEQAEVLLQILKFFKCNAEKSNLKSVEGSPNAGTILFNKDITDVNFKLIDLSPAGLTERVRKV

SEQ ID NO: 621 - protein, 526 aa, synthetic construct
  REGION 1..526: note = MG44-236 effector
MRLRQERLYLYFRQLGRCMYSGEPIDLDHINDSKLYDVDHILPRSYIKDDSLDNKVLVLRSKNAEKSDTYPLPLGFTNQQGWWKMLRAKDLISSGTYDRLMRTAPLTDDDYNDFINRQKVITDQTSKSVIELLKRKYPNATLVYSKAVNVADFKSKFDLYKCRETNDLHHARDAYLNVVVGNVYSTVFGVRIETYVKDGEKWKTYNLKKMFTRDVPGAWNENSIRTVKGVYNSSSMCVTRYAYCNKGAFYKQTVYSGNENITAPRKGKGPLANMERYGGYMTQSTAYFAIVESQGKKGRIKTIEAVPVMVDYQSRNDPDRVVKYFEENGLVDVKLIVPKIKIKQLVSYNGSRVYLAGVGDVRILVHNATELFVDNKIDDYVNQLLKIVEMAKQPTFNKNSDCYIVKTNRMGDIKLVVDKGSNVKLYDELILKLECKQFQGFGAYTSFRNVLTESREKFVDLSTLEQAIVLLEVLKFFKNNADTADLSLIGESKRAGILRFSKNITDVDFRIISQSPCGLTVHVKRV

SEQ ID NO: 622 - protein, 770 aa, synthetic construct
  REGION 1..770: note = MG44-237 effector
MEKEQKFYLGLDIGTNSVGIACTDENYNLLRVKGKDCWAVRLFDEAQTAADRRTARTARRRLQRRRYRINQLQGLFAPLMQDNLFFLRLNNSQFFADDKAGELDGDVNNLFADSGFTDRNFHEKYPTIYHLRFALQQSPVDDIRLYYLALHHIIKYRGHFLYDGNISEVRDVHKLFDALNTVCENTFAENTPHFDIEKADEAKDMLLRSKGKLKDTVKSIKQLFSVQNDDCGKIRTEIINGFCGAKFSPEKLLGDAYSEEKSFAFRDIEEDAFEAMQSTYGDDFALLKAMREIYNFVTFERLFNGQPNISSAMIAVYDKHKSDLKKLKGFIKKNYDTDGGKKCREMFSDVTQKANYVNYVGHVGYGKSRKRVKTCDYDSFIAYVKKFLMDGNFAHDETYDEIMAEIEAKTFLPKILHSDNGLVPHQVNEDELVKIVAQMVRAFPETAQMASKILPLFLFRIPYYVGPLVGSNSWAVRKSDEKITPWNFRDVVDEAASNEEFMRRMTNKCTYLHGVDVLPKCSIAYQKFNTLNQINKLKVNDCAISVPLKQKIFAELFLVKPRVSDKMIASLIVREGAVAPGDSVVLSGKDGGDIKASMSSYIQLKRILGDFVDYDLASGGNVCENIILWHTLNTDKRLVEDLIVKNYGDNPAVAPYVKQLKGLVFNDFGKLSGRLLTELGVVDKQTGELCTVTDLLWNTNENFNELMFDKRYNLEEVIAAENNDDDGKVDYEDVQKLYVSPAVRRGIWQSLQMVDEYVAALGKEPDKVFV

SEQ ID NO: 623 - protein, 1010 aa, synthetic construct
  REGION 1..1010: note = MG44-238 effector
MKSELFECDVENNVELDKYEERKQNILNAIEKNDFLLKLRSNDNILLPNSLYQAELKQILKVSAQKFNFLNNKDADGRSVGQKIIDVVSFRVPYFVGPIGESENGWIRKDKSADFKPWTLDKIIDLDEAENRFIQNMTNKCTYLPTEDVLPQKSLLYSKFRVLNELNNLKINGNAITVETKQQIFDGLFKKTPKVSTKKLVEFLKQNNIINKNDSNVVFTGIDKEFANDYSSYVTFATKFGEEFVNKNLEVFEKIIKYHTIISDKSRLAKRIKREFNIFSDEDIKFLKSLNFSGWGSLSQKFLEGLKFSDKKSANPEMEALTVMSALWETNKNLQEIIFCKTYDLQQKLDANIQKIQRDLLYDDIQNMYTSPAVKRGTWQAISIINELKNKLGKYPDKIFVEVTRNNQEKGEAGRKDSRHKMVVKKYKDKQLKLDCQKLCIEFNKLMEELNQKDNSNLRSEKLYLYFMQLGKDIYTGKPIDISQLNNDNMYNVDHIIPRCKVKDDSIDNKVLVSAAANLAKSDNYPVDGHIQASQKAFWELLQENGLMTDSKLARLQRTEEFTEKDADNFTNQQLVSTNQESKAVIDLLSKVYSNKRNIIFSKAMFVSDFRKNFNINKSRDVNALHHAQDAYLNVVVGNVLFNRFTEGYWKKDTQENNNQTEDKNANTTSVVEKLFRRTVWSNQTGEVVWKGQQSIDLVRKNCEKNSPCISIMPYENKNGEFYNATVYKSSKNHSATSASFALKAKGPLSSIDKYGGYNSLKNAYFIAVESVDANGTVNKTIETVPIIVEYQHRNDANKTQKIIEYIEKTNNIKITKVIKDKIKYRSLLKIDGGLYMLTAKTEDSLKLLKVNQWFLSNKDIGYIKILEKHQNMPATIKELLKTTDEEIIVSPAVKTNSKQLAISRTNNLYLYDLIIAQLGKKIYSLSSISGLVEKLTNARSVFLSLSISAQVELLLGLVKYVGGAYTVDLTLLGEKKQAGSTRIGKNISNLNISLIEQSVTGLYAKEIVL

SEQ ID NO: 624 - protein, 1334 aa, synthetic construct
  REGION 1..1334: note = MG44-239 effector
MKKFYIGADIGTNSVGVACTDESYRLIRAKSKDCWAVRLFDEGETAFDRRTKRTARRRLARRKQRINWLQELFEPFIDDKTFFIRLNNSQYLPEDKDSLLCGNKNNLFENEGEESKFYKKYPTIYHLRKALMDGGNFDIRLYYLALHHIIKYRGHFLYEGSIEDIRDFSNLMKGLDCAIADSYDGGLNLFDSVDSAKVRDILIDKKSGLRDKQVELEKLLCVKSKREKEILKGITGQKISPYVLFGDEFKEEKSFSLNDMSDEEFESKRSSYGESFTLLDLMHSVCNYVKFEKIFEGHSDISSAMISVYEKHKADLVLLKKVVRKQSKEDYNKIFRSVNEEKNYVNYIGYTSKDGRKIKVKKCKGEDFFKYLKKYLNGILNEDNFDIVSKIIKEIDDRIFLPKILHSDNGLFPKQVNEFELKKIIENMVRNYAETEEMASAVLSLFNYKIPYYVGPLTGCNSWVVRTDEKVTPWNFDRVVDLAKSNEAFMRRMTNKCAYIKGEDVLPKASIIYQKYDTLNQLNKLRINDRVISIELKQTIYNELFLKYPKVTDKKIKELLVREGLCSSSETKDITISGKDGDFKSSMSSYIRLKNILGDFVDDDLKSGGKVCENIILWHTLNTDKKIVEDLIEKNYGFIPEIKANIKQLKGLTFNDFGRLSAKLLIGIEGVDKTTGQILTILDVLYQTNQNLNEVLNNESYNFSEIIDEENGIETEIISYETVEELYVSPAVRRGIWQTLLMIDEYVNAVGRQPDKIFIEVTRNDGKKGDNGRTQPRKRQLQEKFKNIGSAYSDIIEELSEEKYTDLKLRQERLYLYFRQLGRCMYTGERIILDELNGNRYDVDHILPRTYVKDDSLDNKVLVCRGANATKADTYPLPTEFSRKEVRAHWKMLLDKDLISKTTYDRLTRIEPLKDDDYNDFINRQKTITDQTAKAVIELLKRKYPNAKLIFSRAKNVNDFKNRFNLFKCRETNDLHHARDAYLNVVVGNVFDSVFSTPLGQSRKDGDVWRIYNLKKLFTRDVIGAWSKDSIKIVKDTYSKPSMSVTRYATCNKGKFYDETVCRKNDSAITAPRKGKGPLSDFTKYGGYTTQKTAYFAIVTSVDKKGKSIKTIEAIPVLVTYKLKSDTDAIQKYLESYLREPNIVVPKVKVKQLVSYNGSLCYLAGTTDNRITVHNASQLYTDNTTDEYVNELIKIIGMGDNGIITGNESQYITKTNKDGVIRIVVNKENNEKLYETLKNKLDSKIYKGLSAFASFKTNMERGKDKFCKLSVLEQAKVLLQILKVFRCNAVNSNIELIGGGRGSGSIKINKNITDVDFKLVNLSPAGLTVRIRKV

SEQ ID NO: 625 - protein, 1416 aa, synthetic construct
  REGION 1..1416: note = MG44-240 effector
MEKIYLGLDIGTNSCGYAVTDGNYNLVRIGGKDAWGVRLFEEAETAQERRAKRTARRRIVRKKLQNLWLQQLFEKEIEKVDPSFFTRLKYSNLNLEDKILSDKNLTSKYSLFNDTVKRVFTDKEYYAKYETVYRLRKELLSSPAEDVRLLYLAIHSILTHRGHFLSETDFSSNVPIEDSYNCLLDKLSAYSVEFNDSKNGLTIKPDKISGIFLLLEDFAQGLPFRQVKENFEKNLDVKTKLDKTVASILLSGKFKTTDVFAVEKEDAVKVDFNDEKFEEVYGTLSGQLSETELAILNLLKDIYSNIQLKKLLGKNNYICEAMVERYDKHNEQLKELKSFVKTYFPSKKNLVFNAQKTSKKKKEEKSGKIANYAAYCYSDLKDGKKQIIDGVASREDFYKFIKNELLECSPEVETDLIKFEEQKQKILNSIEKNDYLLKIRSHDNIVLPNSLYKVELQQILKINEKKFKFLSEKDEKGKTISEKIVDIICFKIPYFVGPIGQSERGWIRKDKNLDFKPWTLNEIINFDEAEDKFIQNMTSKCTYLPTEDVLPKDSLLYSKFRVLNELNNLKVNGNDITVETKQRIFKGLFEKYKKISKNKLIEFLKQENIYPKNESIVITGIDNEFANNYSSYVTLANKFGEEFVNKNYDVFEKIIKYHTIISDKLRLEKRIKREFKIFSNEDVKFLKSLNYSGWGKLSGKFLNGIKFADKKSNSPEFESKTIISAMWETNKNLQEVIFCKEYNLLEKLEANIEKIQRDLVYEDVQNMYTSPSVKRGTWQAISIINELKSKLGKYPDKIFIEVTRNDQEKGDKGRKDSRFGAVVKKYKDKTLKEDCLKEAINYNNLLDELNKRNNSHLRSEKLFLYFMQLGKDAYTGEPIDIAELGNDNAYNVDHIIPRSKVKDDSLDNKVLVSAAANLAKGDEYPLKRKIQFAQKDFWRMLNKNGLMSDKKLARLERTEEFTDKDADDFTNQQLVSTNQESKAVIDLLSKVYDNRRNIVFSKAMFVTEFRNRYNIFKSRDVNDLHHAKDAFLNVVVGNVLFNRFTQGYWKKDKNIKILEDENRVDADEDKNEKVTSVVDKVFGRYVWSNQTGEVVWKGWKDVERIQKICYQNSPVISIMPYVNRNGAFYDETIYKKKNDGEKFKAAFALKEKGPMSSIEKYGGFNSVNNAYFMVVESVDNKGRIKKTIECVPIIVEYKYRNDPDKKQKIIKFIEETNNIKITRVIKDELKFRSVLKINGGLYMLTAKTSDSFKVLKLNQWYISNSDTGYIKILEKYKNMPQVAKECLKEDGERLIVSPAVKENSRPQIITRTQNVELYDLIINQLSKKIYDLSSIKAIVSNLKDKRDLFIALSIPNQTEVLLNLVKYVGGGYLADLKLLGGTEHMGTTRISKDITDLNIYLIEQSVTGLYSKGTKL

SEQ ID NO: 626 - protein, 748 aa, synthetic construct
  REGION 1..748: note = MG44-241 effector
MSSYIRLKNILGDFVDDDLKSGGKVCENIILWHTLNTDKKIVEDLIEKNYGFIPEIKANIKQLKGLTFNDFGRLSAKLLIGIEGVDKTTGQILTILDVLYQTNQNLNEVLNNESYNFSEIIDEENGIETEIISYETVEELYVSPAVRRGIWQTLLMIDEYVNAVGRQPDKIFIEVTRNDGKKGDNGRTQPRKRQLQEKFKNIGSAYSDIIEELSEEKYTDLKLRQERLYLYFRQLGRCMYTGERIILDELNGNRYDVDHILPRTYVKDDSLDNKVLVCRGANATKADTYPLPTEFSRKEVRAHWKMLLDKDLISKTTYDRLTRIEPLKDDDYNDFINRQKTITDQTAKAVIELLKRKYPNAKLIFSRAKNVNDFKNRFNLFKCRETNDLHHARDAYLNVVVGNVFDSVFSTPLGQSRKDGDVWRIYNLKKLFTRDVIGAWSKDSIKIVKDTYSKPSMSVTRYATCNKGKFYDETVCRKDDSAITAPRKGKGPISDVTKYGGYTSQKTAYFAIVTSVDKKGKRIKTIEAIPVLVTYKLKTDTNAIQKYLESYLREPIIVIPKVKVKQLVSYNGSLCYLAGITNNQITVHNASQLYTDNTTDEYVNELIKIIGMGDNGIITGNESQYITKTNKDGVVRIVVNKENNEKLYETLKNKLDSKIYKGLSAFASFKTNMERGKDKFCELSVLEQAKVLLQILKVFRCNAEISDIQAIGGTAHSGKKLFAKNITDVDFKLVNLSPAGLTVRIRKV

SEQ ID NO: 627 - protein, 532 aa, synthetic construct
  REGION 1..532: note = MG44-242 effector
MKKFYIGADIGTNSVGVACTDESYRLIRAKSKDCWAVRLFDEGETAFDRRTKRTARRRLARRKQRINWLQELFEPFIDDKTFFIRLNNSQYLPEDKDSLLCGNKNNLFENEGEESKFYKKYPTIYHLRKALMDGGNFDIRLYYLALHHIIKYRGHFLYEGSIEDIRDFSNLMKGLDCAIADSYDGGLNLFDSVDSAKVRDILIDKKSGLRDKQVELEKLLCAKSKREKEILKGITGQKISPYVLFGDEFKEEKSFSLNDMSDEEFESKRSSYGESFTLLDLMHSVCNYVKFEKIFEGHSDISSAMISVYEKHKADLVLMKKVVRKQSKEDYNKIFRSVNEEKNYVNYIGYTSKDGRKIKVKKCKDEDFFKYLKKYLNGILNEDNFDIVSKIIKEIDDRIFLPKILHSDNGLFPKQVNEFELKKIIENMVRNYAETEEMASAVLSLFNYKIPYYVGPLTGCNSWVVRTDEKVTPWNFDRVVDLAKSNEAFMRRMTNKCAYIKGEDVLPKASIIYQKYDTLNQLNKLRINDRVI

SEQ ID NO: 628 - protein, 1355 aa, synthetic construct
  REGION 1..1355: note = MG44-243 effector
MKKFYLGMDIGTDSVGIAGTDENYNLLCARGKDLWAVRLFDEAKDASARRMKRTARRRLQRRKQRIEWLQELFAPYIEDKCFFLRLNNSGFEKEDKHESLQSQYSLFADAGYTDREFYKKYPTIFHLRRALAERASEEKTDLRLYYLALHHIVKYRGHFLFEGDSISDIRDIKKLFEEFNAVAEDIFPEGDIRLPLEKAEAFRALALSAKGIRDKKKTGEELFETNSPALAELVGLLLGAKAKIGVIFGEEYGEYKEEKLSFKEILDEDFEAKQELYGDNYPLLEAARSIYNYFVFEKILDGNHCISAAMVAVYERHRRDLRLLKNFVKTQFSKEIYYKIFRSEKEAANYCNYISYTKTEKKKIFVKKCKYGDFCKFLKKTLTENRDCVKDKKTLDDILFKIENGDFLPKILNADNGLFPHQINGAELDKILANLCKEYPCFAEKEADGFSVAEKIRKIFLFKIPYYVGPLNNYHEENGNSWVVRKSGKITPWNFEDMVDTASSNEKFIRRMTNKCSYLYGKDVLPKCSMYYQAFDVLNQLNKIKFNEQPISVEMKQELFHSLFLRHRKVTKKLIKEYLTATGKYTSAEAKELSVSGFDGELKANMGAYITLKNCLGDYVDEHPETCENIILWHTLNTDKTIVERQILSHYGDVPVIKEKIKALKGITSFKEFGRLSKELLCELIGGEDPVTREVYTILNRLYHTNFNFNELLFSDTYRFNSAIEAMNAGKDGDVGYDDVKELYVSPMVRRGIWQALTMADEYVQAVGRVPDKIFIEVTRQGDEKKKPTVSRKNQLLENYKGLGQDCRNIDELLTELNDKTDSQLRQERLYLYFKQLGRCAYTGQLIRLEELNGDLYDVDHIMPRSITKDDSLENKVLVRREKNAQKSDEYPLPAGFTDQQRFWKLLRDKGLMSEKKYALLTRTKPLTEDDFRDFINRQLVVTNQTVKAVAELLKRKYGEKGTRIVYSKAKNVDGFKNQYDIVKCRETNDLHHARDAYLNIVVGNVYDTKFTSAYDYYYRKGDAWREYNLKTLFERPVKDAWIGREGIAFVKDVLRKPSMLITRYAYINKGEFYNETIYGKDDKGISAPRKSIEPYNKTEKYGGYKSLTTAYFSVVESKDKKGKLIKTVEAIPVLADYQSKGDREAVLAYLSRMGLREPKLLLPKIKIKSLVSVNGFKVWLAGVTGNRLIIHNAQQWFTDEKTDLYIKNLGKLVEWERTGKIAEEEKARETFSMIKNRKEEVSLLIDRSQNVALYREIVAKLQTKLYRGLSAARSFAEKLSAKEEIFVSLSVLEQAKVLLQIARFMKCNAEAADLSLLKDGAACGILLIGKNITDVDFAVIHQSPCGINTYIQRV

SEQ ID NO: 629 - protein, 1334 aa, synthetic construct
  REGION 1..1334: note = MG44-244 effector
MKKFYIGADIGTNSVGVACTDESYRLIRAKSKDCWAVRLFDEGETAFDRRTKRTARRRLARRKQRINWLQELFEPFIDDKTFFIRLNNSQYLPEDKDSLLCGNKNNLFENEGEESKFYKKYPTIYHLRKALMDGGNFDIRLYYLALHHIIKYRGHFLYEGSIEDIRDFSNLMKGLDCAIADSYDGGLNLFDSVDSAKVRDILIDKKSGLRDKQVELEKLLCVKSKREKEILKGITGQKISPYVLFGDEFKEEKSFSLNDMSDEEFESKRSSYGESFTLLDLMHSVCNYVKFEKIFEGHSDISSAMISVYEKHKADLVLLKKVVRKQSKEDYNKIFRSVNEEKNYVNYIGYTSKDGRKIKVKKCKGEDFFKYLKKYLNGILNEDNFDIVSKIIKEIDDRIFLPKILHSDNGLFPKQVNEFELKKIIENMVRNYAETEEMASAVLSLFNYKIPYYVGPLTGCNSWVVRTDEKVTPWNFDRVVDLAKSNEAFMRRMTNKCAYIKGEDVLPKASIIYQKYDTLNQLNKLRINDRVISIELKQTIYNELFLKYPKVTDKKIKELLVREGLCSSSETKDITISGKDGDFKSSMSSYIRLKNILGDFVDDDLKSGGKVCENIILWHTLNTDKKIVEDLIEKNYGFIPEIKANIKQLKGLTFNDFGRLSAKLLIGIEGVDKTTGQILTILDVLYQTNQNLNEVLNNESYNFSEIIDEENGIETEIISYETVEELYVSPAVRRGIWQTLLMIDEYVNAVGRQPDKIFIEVTRNDGKKGDNGRTQPRKRQLQEKFKNIGSAYSDIIEELSEEKYTDLKLRQERLYLYFRQLGRCMYTGERIILDELNGNRYDVDHILPRTYVKDDSLDNKVLVCRGANATKADTYPLPTEFSRKEVRAHWKMLLDKDLISKTTYDRLTRIEPLKDDDYNDFINRQKTITDQTAKAVIELLKRKYPNAKLIFSRAKNVNDFKNRFNLFKCRETNDLHHARDAYLNVVVGNVFDSVFSTPLGQSRKDGDVWRIYNLKKLFTRDVIGVWSKDSIKIVKDTYSKPSMSVSRYATCNKGKFYDETVCRKNDSAITAPRKGKGPLSDVTKYGGYTTQKTAYFAIVTSVDKKGKSIKTIEAIPVLVTYKLKTDTNAIQKYLESYLREPNIVVPKVKVKQLVSYNGSLCYLAGITNNQITVHNASQLYTDNTTDEYVNELIKIIGMGDNGIITGNESQYITKTNKDGVIRIVVNKENNEKLYETLKNKLDSKIYKGLSAFASFKKNMERGKDKFCELSVLEQAKVLLQILKVFRCNAEISDIQAIGGTAHSGKKLFAKNITDVDFKLVNLSPAGLTVRIRKV

SEQ ID NO: 630 - protein, 1355 aa, synthetic construct
  REGION 1..1355: note = MG44-245 effector
MKKFYLGMDIGTESVGMAATDENYNLLRARGKDLWAVRLFDAANDASARRMKRTARRRLMRRKQRVEWLQELFVPYLEDEYFFLRLNNSGFEKEDKHENLQSQYSLFADGEFTDREFYKNYPTVFHLRQALAEEKSAEKTDLRLYYLALHHIVKYRGHFLFEGESINELRDIKKLFEAFNAVAEEIFPEGEMRLPLEKAEAFRLLALSDKGIRDKKREGEELFHTKSAAMAELIGLLLGAKVKTGIIFAESYEEYKEEKVSFKEISDEDFEAKQEVYGDNFALLKAARAIYNYFVFEKILDGNHSISAAMVAVYERHRRDLRLLKNFVKTQLPKDVYYKIFRSVKESANYANYVCYTKTGKKKIPAKKCKYEDFCKFLKKVLTENKACAEDQETLNYILSKIENGEFLPKILNADNGLFPHQINGAELDVILANLCKEYPSFAEKDPDGFSPAEKIRKIFLFRIPYYVGPLNTYHKKNGNSWAVRKAGKITPWYFENVVDMAASNEKFIRRMTNKCSYLYGKDVLPKYSMYYQAFDVLNQLNKIKFNQQPISVELKQELFQSLFLRHRKVTKKLIKEYLITTGKYTPAEAKELSVSGFDGELKANMGSYIVLKNCLGEYVDEHPEVCENIILWHTLNTDKNIVESLILSRYGNVPVIKEKIKALKGITSFKEFGRLSKELLCELAGGEDPVTGEVYTILNRLYHTNLNFNELLFSDAYRFNTAIEETNAGRGGDVVYNDVKELYVSPMVRRGIWQALSMADEYVQAVGRVPDKIFIEVTRQEDEKKKPTVSRKNRLLEEYKGLGEDCRNIDELLTELNDKTDSQLRQERLYLYFKQLGRCAYTGQLIRLDELNSDLYDVDHIMPQSVTKDDSLENKVLVKREKNAQKSDQYPLPVGFTDQQGFWKLLKDKGLMGEKKYALLTRTQPLTEEDFRDFINRQLVVTNQTVKAVAELLKRKYGGQGTRIVYSKAKNVDDFKQKYGLVKCRETNDLHHARDAYLNVVVGNVYDTKFTSAYDYYYRKNDAWREYNLKTLFERPTKDAWIGQEGIAFIKSVLRKPSMQVTRYAYTNKGEFYNETVYGKEDGGISAPRKAVKPYDKTGKYGGFKSLTTAYFTAVESQDKKGMLMKTIEAIPVLVDYQSKDDEKKVLAYLSQIGLREPRLLIPKIKIKSLVSVNGFKVWVAGVTGNRLIIHNAQQWFTDEKTDLYIKNLGKLVEWERTGKIAEEERMKEIFPMVKNRKEEVSVLIDRTQNVALYREIVTKLHSKLYQGLSAARSFAEKLSAKEESFLSLSVLEQAKVLLQIVRFMKCNAEAADLSLLKDGSRCGILSIGKNITDVDFKVIHQSPCGLSTYIQRT

SEQ ID NO: 631 - protein, 1347 aa, synthetic construct
  REGION 1..1347: note = MG44-246 effector
MEKEQKFYLGLDIGTNSVGIACTDENYNLLRVKGKDCWAVRLLDEAQTAADRRTARTARRRLQRRRYRINQLQGLFAPFMQDNLFFLRLNNSQFFADDKAGELDGDVNNLFADSGFTDRNFHEKYPTIYHLRFALQQSPAGDIRLYYLALHHIIKYRGHFLYDGNVSEVRDVHKLFDALNTVCENTFAENTPHFDTEKADEAKDMLLRSKGKLKDTVKSIKQLFSVQNDECGKIRTEIINGFCGAKFSPEKLLGDAYSEEKSFAFRDVEEDAFEAMQSTYGDDFALLKAIREIYNFVTFERLFNGQPNISSAMIAVYDKHKRDLKKLKGFIKKNYDTDGGKKCREMFSDVTQKANYVNYVGHVGYGKSRKRVKTCDYDSFIAYVKKFLMDGNFAHDETYDEIMAEIEAKTFLPKNLHSDNGLVPHQVNEDELVKIVAQMVRAFPETAQMASKILPLFLFRIPYYVGPLVGSNSWAVRKSDEKITPWNFRDVVDEAASNEEFMRRMTNKCTYLHGVDVLPKCSIAYQKFNTLNQINKLKVNDCAISVSLKQKIFAELFLVKPRVSDKMIASLIVREGAVAPGDSVVLSGKDGGDIKASMSSYIQLKRILGDFVDYDLASGGNVCENIILWHTLNTDKRLVEDLIVKNYGDNPAVAPYVKQLKGLVFNDFGKLSGRLLTELGVVDKQTGELCTVTDLLWNTNENFNELMFDKRYNLEEVIAAENEDDNDKVDYREVQKLYVSPAVRRGIWQSLQMVDEYVAALGKEPDKVFVEVSREEGVKGDKGRTHSRKKQLLEKYKNINPKDVENIDELTGELNSDKISDMRLRQERLYLYFRQLGRCMYSGEPIDLDHINDSKLYDVDHILPRSYIKDDSLDNKVLVLRSKNAEKSDTYPLPLGFTNQQGWWKMLRAKDLISSGTYDRLMRTAPLTDDDYNDFINRQKVITDQTSKAVIELLKRKYPNATLVYSKAVNVADFKSKFDLYKCRETNDLHHARDAYLNVVVGNVYSTVFGVRIETYVKDGEKWKTYNLKKMFTRDVPGAWNENSIRTVKGVYNSSSMCVTRYAYCNKGAFYKQTVYSGNENITAPRKGKGPLANMERYGGYMTQSTAYFAIVESQGKKGRIKTIEAVPVMVDYQSRNDPDRVVRYFEENGLVDVKLIVPKIKIKQLVSYNGSRVYLAGVGDVRILVHNATELFVDNKIDDYVNQLLKIVEMAKQPTFNKNSDCYIVKTNRMGDIKLVVDKGSNVKLYDELILKLECKQFQGFGAYTSFRNVLTESREKFVDLSTLEQAIVLLEVLKFFKNNADTADLSLIGESKRAGILRFSKNITDVDFRIISQSPCGLTVHVKRV

SEQ ID NO: 632 - protein, 1336 aa, synthetic construct
  REGION 1..1336: note = MG44-247 effector
MNKKDFYVGLDIGTNSVGIACTDQDYNLRRSNGKDCWAVRLFDTANTAAERRVFRTARRRLQRRKYRLGQLQALFAPYIADDKFFIRLNNSQFFVDDKDECLSADKNTLFADSGYTDKEFHEAFPTIYHLRLALQNGHASDIRLYYLALHHIVKYRGHFLFEGSVGDIRDIKKLFVDLNTACEAVYADEVPYFDTQLCEQAKNTLMKPSGIRDKQKALEALFDGTSKAQSEIIKAMCGGKLAPKTMFEGRYEEEKSFSLSEMQDEAFDALAEVFGDDFVLLQALRNLCNFVKFEKLFAGQPNISSAMIAVYDKHAADLAMLKIFLKTYAPQMYNKVFRSVTESANYVNYIGYNKKKSAKTKVAPCKYEDFLAFVKKIVAAVDCADTELRDKILAEIDNKTFLPKILHADNGLIPHQVNEDELVKIVKSMTEAFPETQAMAKQILPLFRFRIPYYVGPLVGENSWAVRKSDERITPWNFNEVIDLAASNEQFMRRMTNKCTYLHGEDVLPKCSIVYQKFNTLNQINKLQVDGRAISVELKKKIFDQLFLAKSKVSDKMIVDLLVREGVVSPQERTQAVLSGKDGDVKASMSSYIQLKRILGDFVDEDISSGGNVCENIILWHTLNTDKSIVEDLLRRNYGDNPHITPYIKQLKGLMFADFGRLSDKLLTGLRTVDKSTGELRSILDLLYDTNQNFNEIIFDERYDFAELIRKENSGESTEITYEEDIATMRVSPALKRGIWQSLQLVYEYVAALGGSPDKIFVEVTREDGVKGNDGRTVSRKKQLLEKYKGVEGIDELVAELQSDDVSDMRLRQEKLYLYFRQLGRCMYTGKRIDLSQLNTDLYDVDHILPRTYIKDDSLDNKVLVLRSKNAEKSDAYPLPQGFSNQAPFWKLLLDKGLIGEKTYKRLTRTAPLTDDDYNDFINRQKTITDQTAKAVVELLKRKYPQAKVVFSKAKNVSDFKQKFDLHKCRETNDLHHARDAYLNIVVGNVYDACFTTPMAQFRKDGDVWRTYNLKTMFTRNVKGTWDENSLATVKKTYSKCSMSVTEYTYCGKGAFYNQTVYGAGDTSVTAPRKANGPLANTARYGGYKSQNTAYFAIVDSLGKKDVTQRTMEAIPVMVAYRATTDTNAVYDYLTNTLQLRDVKVVVPKVKKNQLVSYNGSLVRLTGVTGVYITTNNDRQLFTDNKTDEYVNQLLKLLEMDKNGRVDKTASEYVMKTNRMGDVKLVVDKAHNENLYNCFVEKLQGGKYGKLSSFVTFGKNLQSGKEKFANLTTLEQAYVIVQILRFFKCDAQTADIRLIGGSGLSGKVLFNKDITTVDFQLIDQSPCGLTVRTRKL

SEQ ID NO: 633 - protein, 571 aa, synthetic construct
  REGION 1..571: note = MG44-248 effector
MEKFYIGTDIGTNSAGVACTDENYNLLRVKGKDCWAVRLFDEGKTAVDRRTFRTGRRRLQRRKQRIAWLQDLFAPYMEDETFFIRLNNSQFLPEDKDALLGGDKNTLFAGVYDDKKFHAEFPTVYHLREALMRGGVNDLRLYYLALHHIVKYRGHFLTEGSVDDVRDFGRLLGNLNGVISDVYGDEVPLFSEAAVDEAKNVLLDKTLGIKDRSTELEKIFGVKDKTSKEIIKGLCGGKISPAVLFGDEYKEEKSFSFKEITDDNFESMRGTYGDNFTVLEVIRSIYGYVIIENLLSGHDDLSSAMIAVYDKHKKDLLALKAFIRSERPEDYNKIFKSTDEKSNYVNYIGYTKKGGDKKKVKKCKDDEFYAYIKKYLQGLTDVKDIAARDKFLKDIEAGSFMQKILHSDNGLFPKQINEYELKKILENMVKSFPATAEIKDKIVTLFNYRIPYYVGPLAGKEETCWAVKKSNEKITPWNFDDVIDKAKSNEKFMLRMTNKCSYLRGEDVLPKASIIYQKFDTLNQLNKLRVNDELLSIDLKQKIFNELFLKYPKVSDKKIIDLLVRETRPRA

SEQ ID NO: 634 - protein, 847 aa, synthetic construct
  REGION 1..847: note = MG44-249 effector
DNLFFLRLNNSQFFADDKAGELDGDVNNLFADSGFTDRNFHKKYPTIYHLRFALQQSPVDDIRLYYLALHHIIKYRGHFLYDGNVSEVRDVHKLFDALNTVCENTFAENTPHFDIEKADEAKDMLLRSKGKLKDTIKSIKQLFSVQNDDCGKIRTEIINGFCGAKFSPEKLLGDAYSEEKSFAFRDVEEDAFEAMQSTYGDDFALLKAMREIYNFVTFERLFNGQPNISSAMIAVYDKHKSDLKKLKGFIKKNYDTDGGKKCREMFSDVTQKANYVNYVGHVGYGKSRKRVKTCDYDSFIAYVKKFLMDGNFAHDETYDEIMAEIEAKTFLPKILHSDNGLVPHQVNEDELVKIVAQMVRAFPETAQMASKILPLFLFRIPYYVGPLVGSNSWAVRKSDEKITPWNFRDVVDEAASNEEFMRRMTNKCTYLHGVDVLPKCSIAYQKFNTLNQINKLKVNDCAISVSLKQKIFAELFLVKPRVSDKMIASLIVREGAVAPGDSVVLSGKDGGDIKASMSSYIQLKRILGDFVDYDLASGGNVCENIILWHTLNTDKRLVEDLIVKNYGDNPAVAPYVKQLKGLVFNDFGKLSGRLLTELDVVDKQTGELCTVTDLLWNTNENFNELMFDKRYNLEEVIAAENEDDNDKVDYREVQKLYVSPAVRRGIWQSLQMVDEYVAALGKEPDKVFVEVSREEGVKGDKGRTHSRKKQLLEKYKNINPKDVENIDELTGELNSDKISDMRLRQERLYLYFRQLGRCMYSGEPIDLDHINDSKLYDVDHILPRSYIKDDSLDNKVLVLRSKNAEKSDTYPLPLGFTNQQGWWKMLRAKDLISSGTYDRLMRTQPLR

SEQ ID NO: 635 - protein, 1336 aa, synthetic construct
  REGION 1..1336: note = MG44-250 effector
MEKFYIGADIGTNSVGIACTDENYNLLRIKGKDCWTVRLFDECKTAEERRGFRTSRRRTARRKQRINFLQSLFAPYMNDKTFFIRLNNSQFLPEDKSELLHGDKNTLFSGDYDDKKFHAEFPTIYHLRDKLMSGGIYDLRLYYLALHHIIKYRGHFLFEGSMEDVRDLGKLLNALNDAMVGVYGDELSLFDKSVAEEAKSVLLDDKLKIRDKQIGLEKVFRVDDKIRKEIIKGLCGGKISPSILFGDEYKDEKNFSFKEISDEIFESMRDTYGDDFGLLCAIRSVYGFVTFEKLLEGHSSLSAAMIAVYEKHKNDLKRLKSFIKSERPEDYNKIFKSTEEKCNYVNNVGYTKKGGDKKKVKKCKDDEFYAYLKKYLSGLDDVKDAETRNAIIEEIEDGKFLPKILHSDNGLFPRQINESELNKIVGNMVKAYPETAAVEEKILTLFRFRIPYYVGPLSGENSWAVRKSDDKITPWNFYDVIDAAKSNEEFMRRMTNKCAYLQGEDVLPKASVLYQKFDTLNQLNKLRVNDEIISVELKKKIYNELFLVYPKVSDKKIKELLVREGRISPSDVNDTVLSGKDGEFKASMSSYIRLKKILGDFVDKDLSENGGVIENIILWHTLNTDKSIVENLIKSNYGKIPEIKNALPQLKGLTFNDFGRLSAKLLSGIYTIIAETGELRNIIDTLYETNENLNEILNDERYEFGRIINEENGQADEEVTYETVKKLYVSPAVRRGIWQAMSVTDEYVRAIGRAPDKIFIEVTRTDGKKGDAWRTQPRKRRLQEKFKALCNDGAFDDIIAELDDEKYTDMRLRQERLYLYFRQLGRCMYTGQRISLDDINDTNLYDVDHILPRTFIKDDSLDNKVLVLRSKNAQKSDTYPLPAGFSDQRGFWKLLLDKGLIEKVTYDRLTRTEPLREDEYRDFINRQKVITDQTVKAVAELMRRKYPTAKIVYSKAKNVSDFRKKFKLFKCRETNDLHHARDAYLNVVVGNVYDTVFSTPMAMFRKDGDVWRNYNLKKLFTREVKFAWNESSIAIVKKTYARPSMTVTRYAVCAKGGFYDQTIYGKGDIGITSPRKANGPLSDMSKYGGYKSQSTAYFAIVSSTDKKGNKIKTIEAVPVLTAYQAKTDNKAVEKYFADRLSTPEIIVPKLKIKQLISFNGTPCYLAGITGTRIIAHSAVQLFTDNKTDDYVNSLLNLEDMKSKKAVNVGDDKFVMKTDHTGAEKLVIDKATNIALYRDLMRRLGLKIYSGISAFATFAKNMKSGEDKFISLTVCDQATVLLQILKFFKCNAEISDITLIGGSGKSGTVLLNKNITDVDFEIINLSPAGLIERVRKV

SEQ ID NO: 636 - protein, 1408 aa, synthetic construct
  REGION 1..1408: note = MG44-251 effector
MDKKFYLGLDIGTASVGWALTDENYELVHLRGKSAWGVHLFEEAKTAEKRRLFRSARRRKARTKRRINLLQELFSEEIAKIDPLFFIRLNNSTFFADDKDTALLGKKDTLFSDRNFTDKDFHKLYKTIYHLQKELIDDKNTKFDIRFIYLALHHLIKYRGHFYLEESFNMDEFGIHQIKEGFEKLQVFFEDEEEIKNLFNKANRDGFYSIVEKVRGVNNTKKALKDLFATKNKIVNNTLEFIASGSSTVGRLFPFLEFGEEDEKKKINFGDEEFENQYYEIEGMVGEEKIILIDAAKQLYDYIIIARLMDGEKFIAHSMVKKYNKHRDDLKRLKKIIKKACGQEEYNAFFKDNVKTVNNKPKRVTDNYPAYIGMTKIKGVKQSVKKITKADEINKFYNRIKKLISNVHTPEADKIREEIEKGVFLPKITSVDNAKIPNQFFEYQVSKILDNAAKHYPFLNKVDGELSIKDKILKILTFRIPYYVGPLSDINNLNSKEGGFSWVVRKTNETVLPWNLDKVIDLDKTAEQFILNMTNKCSYLLGEDVIPKQSLLYEEYNMLNHLNVIKVNEKFLSKDEKDELIENVAKKRVTVTQKAINDYFARRLKKDVTISGFDIDAKFSLSSYHKLNRIFPGRINNEPQNARLIRNLERVILLGTIYSSPTDFAKRVTTNKQFREFFTEEELKKLSRLRFSGWGNFSRLLLAGYDSTSKKERLNQSLTYKDEKTGNELSIIEIMREEPLNFNQALFDEKYNFNEIIKRFNDNKDETLDVDELIDSYYLSPAVKRSIKRTIKIVDEVIQVNEGIVPDKIFVEVTRENEAKTKGKGRTISRLNKLRDIYKKAIKDADEFRELAKELENENLDDSYLSPKKVYLYYLQNGKCAYSGEPLDLLSSDIDIDHIVPRCLVKDDSFDNLVLVKKEENNKKGDHYPIRTDVIRRQKPFWKQLKKLGLMSNAKYEKLTRTRELTAEDFQGFINRQLVITNQANKAVAEILKKLYGNATIVYSKASNVTNFRNQFNITKCREINNVHHAHDAYLNVVVGNYFHTLFGSRYYFSKDNDEEPWSPKTAFKYTVKGCWDKDRSLVTVMKMLKRQDVLFTRMPEIRSGEFYDQTASKAAENLLPIKESGPLTNTARYGGYSGKNAAYFTIIEHTNKKNKRERIFISMPIIINQKIKQGQTTFKEYLKNDLKLVKPKVIYPLIPFNTVIKRGKSLQFLSGYKGEFSQVYLRNMIEPYFDNFTYEYLTLIYKYFEQKSLKGKKKKKDETSEVIISEDQENQEEVQQIKEIQVIFSKDEERLRFINFKKNKKVFEKLIEKIKKPIYKKSHTERRIKIINNKNEFYKLSLERQTEIIISLHKLLKTGVPGRNDIDLAEFGVKTGELTASYKIEDMSIVKQSITGLYQKEIIIKQV

SEQ ID NO: 637 - protein, 1386 aa, synthetic construct
  REGION 1..1386: note = MG44-252 effector
MKKQNNYYIGLDLGTNSVGWAVTNEKYELLHLKRKPAIGVNTFEKAKTAEQRRNYRSTRRRLARRKQRVLLLQTFFAEEVAKKDPTFFLRLNNSPYFKEDKHHSLQDTKFSLFNDKDFTDKDFHKKYKTIYHLQNDIISQPDKKFDIRLVYLAVHHLIKYRGNFIKQDENINVAEFTNSLVTDAFQELAHYFEDTDLIAAQNFFVNENVRKYEAIVSDKTNGGLKRATDKIFEQFEIKDKTLKTLLSLALGKVTRLNQIFSDEIVDDEQGKITIDFKSISYEEKYNYIKTVIGEVNIVLIDELKRLYDYFVISRLMDGKTLVAEAMVEKYEKHRSDLALLKKIFREHASKEDYRKVFTTLYTTDDKGKKKVITDVNYPRYIGKKSPYVIVKKGDYADFKKFLNKMFKDLGLLSLNDVIKVQEGLDDETFLPLINSKDNATIPYQFNEYQLRLILENQSKYYKFLNEKVDESSLTTLEKIMSIISFKIPYYIGPLVAEDNHPFAWVKRKSFEKVTPWNFSDVIDEATSASRFIERMTNKCTYIPTEDVLPREAILYQEYLALDVLNNLKINGEAIDNYAKQTLLTALYSNKTPLTKKRIATILAKNKNDVVAVSGIDDDVKLAFTSLHKFKAILGENQDLTIEDMEKIIFYRTIFTEQKMFNKKVDELLGHRLSEELCKKIKQLKFKEWSRFSNAFLTGFSKTLNKPVLFDEKTGEVISIIDIMRNNVLSLQQVIHHEKYGVLEALNKYNESMKTNENAFEDVYNLYLSPSVKRPVIKAIHLVDEIIKANDNKLPKKIFLEVTRHDDFARKGTKTISRKKQLDDLYKIAVKESKDLKDLMDELNKKTDADLRSRKLYLYFLQHGKCLYTGNPIALENLVMGDYDIEHIIPQSLITDDSLNNICLVESNINKAKGDVYPLPRTIVNVEKMKPFWERLMKRGFMSESKYQRLIRMSELTEEERFSFINRQLVETSQANKAVAKILEDRYGKGSVVYSKAQRVSDFRHKFKLLKQRDLNKAHHAHDAYLNIVVGNYNDAQTRLAYINKQTGKNFKFNPATAFEEKSFLDVWDKKSNLATIKAVLSRKNILFTQGTYISKGEFYDQQLSPAGEGKLTPVKESGPLSDTTKYGGYSSLNTSHFALVEIPKKRGSERRLIQVTRLHFAKIASGKMTLEEYLITYVGLENPKVIIDVIPLNSLIKRGKTIRSISGFDSGNTLIAHNHQEPFFSKDIEDSYYYLNRYLREIELREKEDTELLTSNEPYTIIIGNRNEKEKVQKIVISKESNEKTYLELAMHFAKDIYEHIFRGVNDTLLSNLDNFKTKSIYEQANIIKQLVMLLQTGALPASINLTSVGLNKSINRNRNINLIEKGDKLLIQSITGLYDKEICLA

SEQ ID NO: 638 - protein, 1409 aa, synthetic construct
  REGION 1..1409: note = MG44-253 effector
MDKKFYLGLDIGTASVGWALTDENYELVHLRGKSAWGVHLFEEAKTAEKRRLFRSARRRKARTKRRINLLQELFSEEIAKIDPLFFIRLNNSTFFADDKDTALLGKKDTLFSDRNFTDKDFHKLYKTIYHLQKELIDDKNTKFDIRFIYLALHHLIKYRGHFYLEESLNMDEFGIHQIKEGFEKLQVFFEDEEEIKNLFNKANRDGFYSIVEKVRGVNNTKKALKDLFATKNKIVNNTLEFIASGSSTVGRLFPLLEFGEEDEKKKINFGDEEFENQYYEIEGMVGEENIILIDAAKQLYDYIIIARLMDGEKFIAHSMVKKYNKHRDDLKRLKKIIKKACGQEEYNAFFKDNVKTVNNKPKRVTDNYPAYIGMTKIKGVKQSVKKITKADEINKFYNRIKKLISNVHTPEADKIREEIEKGVFLPKITSVDNAKIPNQFFEYQVSKILDNAAKHYPFLNKVDGELSIKDKILKILTFRIPYYVGPLSDINNLNSKEGGFSWVVRKTNETVLPWNLDKVIDLDKTAEQFILNMTNKCSYLLGEDVIPKQSLLYEEYNMLNHLNVIKVNEKFLSKNEKDELIENVAKKRVTVTQKAINDYFATRRLKKDVTISGFDIDAKFSLSSYHKLNRIFPGRINNEPQNARLIRNLERVILLGTIYSSPTDFAKRVTTNKQFREFFTEEELKKLSRLRFSGWGNFSRLLLAGYDSTSKKERLNQSLTYKDEKTGNELSIIEIMREEPLNFNQALFDEKYNFNEIIKRFNDNKDETLDVDELIDSYYLSPAVKRSIKRTIKIVDEVIQVNEGIVPDKIFVEVTRENEAKTKGKGRTISRLNKLRDIYKKAIKDADEFRELAKELENENLDDSYLSPKKVYLYYLQNGKCAYSGEPLDLLSSDIDIDHIVPRCLVKDDSFDNLVLVKKEENNKKGDHYPIRTDVIRRQKPFWKQLKKLGLMSNAKYEKLTRTRELTAEDFQGFINRQLVITNQANKAVAEILKKLYGNATIVYSKASNVTNFRNQFNITKCREINNVHHAHDAYLNVVVGNYFHTLFGSRYYFSKDNDEEPWSPKTAFKYTVKGCWDKDRSLVTVMKMLKRQDVLFTRMPEIRSGEFYDQTASKAAENLLPIKESGPLTNTARYGGYSGKNAAYFTIIEHTNKKNKRERIFISMPIIINQKIKQGQTTFKEYLKNDLKLVKPKVIYPLIPFNTVIKRGKSLQFLSGYQGEFNKVYLRNMIEPYFDNFTYEYLTLIYKYFEQKSLKGKKKKKDETSEVINSEDQENQEEVQQIKEIQVIFSKDEERLRFINFKKNKKVFEKLIEKIKKPIYEKSHTVRRIKIINNKNEFYKLSLERQTEIIISLHKLLKTGVPGRNDIDLAEFGVKTGGLTASYKIEDMSIVKQSITGLYQKEIIIKQV

SEQ ID NO: 639 - protein, 1386 aa, synthetic construct
  REGION 1..1386: note = MG44-254 effector
MKKQNNYYIGLDLGTNSVGWAVTNEKYELLHLKRKPAIGVNTFEKAKTAEQRRNYRSTRRRLARRKQRVLLLQTFFAEEVAKKDPTFFLRLNNSPYFKEDKHHSLQDTKFSLFNDKDFTDKDFHKKYKTIYHLQNDIISQPDKKFDIRLVYLAVHHLIKYRGNFIKQDENINVAEFTNSLVTDAFQELAHYFEDTDLIAAQNFFVNENVRKYEAIVSDKTNGGLKRATDKIFEQFEIKDKTLKTLLSLALGKVTRLNQIFSDEIVDDEQGKITIDFKSISYEEKYNDIKTVIGEVNIVLIDELKRLYDYFVISRLMDGKTLVAEAMVEKYEKHRSDLALLKKIFREHASKEDYRKVFTTLYTTDDKGKKKVITDVNYPRYIGKKSPYVIVKKGDYADFKKFLNKMFKDLGLLSLNDVIKVQEGLDDETFLPLINSKDNATIPYQFNEYQLRLILENQSKYYKFLNEKVDESSLTTLEKIMSIISFKIPYYIGPLVAEDNHPFAWVKRKSFEKVTPWNFSDVIDEATSASRFIERMTNKCTYIPTEDVLPREAILYQEYLALDVLNNLKINGEAIDNYAKQTLLTALYSNKTPLTKKRIATILAKNKNDVVAVSGIDDDVKLAFTSLHKFKAILGENQDLTIEDMEKIIFYRTIFTEQKMFNKKVDELLGHRLSEELCKKIKQLKFKEWSRFSNAFLTGFSKTLNKPVLFDEKTGEVISIIDIMRNNVLSLQQVIHHEKYGVLEALNKYNESMKTNENAFEDVYNLYLSPSVKRPVIKAIHLVDEIIKVNDNKLPKKIFLEVTRHDDFARKGTKTISRKKQLDDLYKIAVKESKDLKDLMDELNKKTDADLRSRKLYLYFLQHGKCLYTGNPIALENLVMGDYDIEHIIPQSLITDDSLNNICLVESNINKAKGDVYPLPRTIVNVEKMKPFWERLMKRGFMSESKYQRLIRMSELTEEERFSFINRQLVETSQANKAVAKILEDRYGKGSVVYSKAQRVSDFRHKFKLLKQRDLNKAHHAHDAYLNIVVGNYNDAQTRLAYINKQTGKNFKFNPATAFEEKSFLDVWDKKSNLATIKAVLSRKNILFTQGTYISKGEFYDQQLSPAGEGKLTPVKESGPLSDTTKYGGYSSLNISHFALVEIPRKRGSERRLIQVTRLHFAKIASGKMTLEEYLITYVGLENPKVIIDVIPLNSLIKRGKTIRSISGFDSGNTLIAHNHQEPFFSKDIEDSYYYLNRYLREIELREKEDTELLTSNEPYTIIIGNRNEKEKVQKIVISKESNEKTYLELAMHFAKDIYEHIFRGVNDTLLSNLDNFKTKSIYEQANIIKQLVMLLQTGALPASINLTSVGLNKSINRNRNINLIEKGDKLLIQSITGLYDKEICLA

SEQ ID NO: 640 - protein, 1386 aa, synthetic construct
  REGION 1..1386: note = MG44-255 effector
MKKQNNYYIGLDLGTNSVGWAVTNEKYELLHLKRKPAIGVNTFEKAKTAEQRRNYRSTRRRLARRKQRVLLLQTFFAEEVAKKDPTFFLRLNNSPYFKEDKHHSLQDTKFSLFNDKDFTDKDFHKKYKTIYHLQNDIISQPDKKFDIRLVYLAVHHLIKYRGNFIKQDENINVAEFTNSLVTDAFQELAHYFEDTDLIAAQNFFVNENVRKYEAIVSDKTNGGLKRATDKIFEQFEIKDKTLKTLLSLALGKVTRLNQIFSDEIVDDEQGKITIDFKSISYEEKYNDIKTVIGEVNIVLIDELKRLYDYFVISRLMDGKTLVAEAMVEKYEKHRSDLALLKKIFREHASKEDYRKVFTTLYTTDDKGKKKVITDVNYPRYIGKKSPYVIVKKGDYADFKKFLNKMFKDLGLLSLNDVIKVQEGLDDETFLPLINSKDNATIPYQFNEYQLRLILENQSKYYKFLNEKVDESSLTTLEKIMSIISFKIPYYIGPLVAEDNHPFAWVKRKSFEKVTPWNFSDVIDEATSASRFIERMTNKCTYIPTEDVLPREAILYQEYLALDVLNNLKINGEAIDNYAKQTLLTALYSNKTPLTKKRIATILAKNKNDVVAVSGIDDDVKLAFTSLHKFKAILGENQDLTIEDMEKIIFYRTIFTEQKMFNKKVDELLGQRLSEELCNKIKQLKFKEWSRFSNAFLTGFSKTLNKPVLFDEKTGEVISIIDIMRNNVLSLQQVIHHEKYGVLEALNKYNESMKTNENAFEDVYNLYLSPSVKRPVIKAIHLVDEIIKANDNKLPKKIFLEVTRHDDFARKGTKTISRKKQLDDLYKIAVKESKDLKDLMDELNKKTDADLRSRKLYLYFLQHGKCLYTGNPIALENLVMGDYDIEHIIPQSLITDDSLNNICLVESNINKAKGDVYPLPRTIVNVEKMKPFWERLMKRGFMSESKYQRLIRMSELTEEERFSFINRQLVETSQANKAVAKILEDRYGKGSVVYSKAQRVSDFRHKFKLLKQRDLNKAHHAHDAYLNIVVGNYNDAQTRLAYINKQTGKNFKFNPATAFEEKSFLDVWDKKSNLATIKAVLSRKNILFTQGTYISKGEFYDQQLSPAGEGKLTPVKESGPLSDTTKYGGYSSLNISHFALVEIPKKRGSERRLIQVTRLHFAKIASGKMTLEEYLITYVGLENPKVIIDVIPLNSLIKRGKTIRSISAFDSGNTLIAHNHQEPFFSKDIEDSYYYLNRYLREIELREKEDTELLTSNEPYTIIIGNRNEKEKVQKIVISKESNEKTYLELAMHFAKDIYEHIFRGVNDTLLSNLDNFKTKSIYEQANIIKQLVMLLQTGALPASINLTSVGLNKSINRNRNINLIEKGDKLLIQSITGLYDKEICLA

SEQ ID NO: 641 - protein, 1386 aa, synthetic construct
  REGION 1..1386: note = MG44-256 effector
MKKQNNYYIGLDLGTNSVGWAVTNEKYELLHLKRKPAIGVNTFEKAKTAEQRRNYRSTRRRLARRKQRVLLLQTFFAEEVAKKDPTFFLRLNNSPYFKEDKHHSLQDTKFSLFNDKDFTDKDFHKKYKTIYHLQNDIISQPDKKFDIRLVYLAVHHLIKYRGNFIKQDENINVAEFTNSLVTDAFQELAHYFEDTDLIAAQNFFVNENVRKYEAIVSDKTNGGLKRATDKIFEQFEIKDKTLKTLLSLALGKVTRLNQIFSDEIVDDEQGKITIDFKSISYEEKYNDIKTVIGEVNIVLIDELKRLYDYFVISRLMDGKTLVAEAMVEKYEKHRSDLALLKKIFREHASKEDYRKVFTTLYTTDDKGKKKVITDVNYPRYIGKKSPYVIVKKGDYADFKKFLNKMFKDLGLLSLNDVIKVQEGLDDETFLPLINSKDNATIPYQFNEYQLRLILENQSKYYKFLNEKVDESSLTTLEKIMSIISFKIPYYIGPLVAEDNHPFAWVKRKSFEKVTPWNFSDVIDEATSASRFIERMTNKCTYIPTEDVLPREAILYQEYLALDVLNNLKINGEAIDNYAKQTLLTALYSNKTPLTKKRIATILAKNKNDVVAVSGIDDDVKLAFTSLHKFKAILGENQDLTIEDMEKIIFYRTIFTEKKMFNKKVDELLGHRLSEELCKKIKQLKFKEWSRFSNAFLTGFSKTLNKPVLFDEKTGEVISIIDIMRNNVLSLQQVIHHEKYGVLEALNKYNESMKTNENAFEDVYNLYLSPSVKRPVIKAIHLVDEIIKANDNKLPKKIFLEVTRHDDFARKGTKTISRKKQLDDLYKIAVKESKDLKDLMDELNKKTDADLRSRKLYLYFLQHGKCLYTGNPIALENLVMGDYDIEHIIPQSLITDDSLNNICLVESNINKAKGDVYPLPRTIVNVEKMKPFWERLMKRGFMSESKYQRLIRMSELTEEERFSFINRQLVETSQANKAVAKILEDRYGKGSVVYSKAQRVSDFRHKFKLLKQRDLNKAHHAHDAYLNIVVGNYNDAQTRLAYINKQTGKNFKFNPATAFEEKSFLDVWDKKSNLATIKAVLSRKNILFTQGTYISKGEFYDQQLSPAGEGKLTPVKESGPLSDTTKYGGYSSLNTSHFALVEIPKKRGSERRLIQVTRLHFAKIASGKMTLEEYLITYVGLENPKVIIDVIPLNSLIKRGKTIRSISGFDSGNTLIAHNHQEPFFSKDIEDSYYYLNRYLREIELREKEDTELLTSNEPYTIIIGNRNEKEKVQKIVISKESNEKTYLELAMHFAKDIYEHIFRGVNDTLLSNLDNFKTKSIYEQANIIKQLVMLLQTGALPASINLTSVGLNKSINRNRNINLIEKGDKLLIQSITGLYDKEICLA

SEQ ID NO: 642 - protein, 1389 aa, synthetic construct
  REGION 1..1389: note = MG44-257 effector
MKKTYLGLDIGTNSVGWALTNENYELIHLRGKSAWGVHMFDEANTAKERRNYRSTRRRKARIKRRINLLQDLFAAEMAKVDPLFFTRLNNSTFFSEDKDKALLGKKDSLFSDKNFTDKDFYKNEKTKTIYHLQKLLIDDKNTKYDLRFIYLAIHHLIKYRGHFHFEGQNINIDEFGKNQIKEGFEIINDYLSMNNLTTFVFSADKIIGFEKIVENERGINNTKKALKDLFNTKEKIVVNILDFIANGKVKLKKIFDNLELQEEENFEIDFSVEDFETQYVEAEAIIGEEHIVLIDAVKQLNDYLVVARLMNGEKFVAHAMVKKYNKHKEDLRKLKKIIKENCSQEQYDTFFKAADQENNYPAYIGMTKIRGARHKIKKLEKPSEINKFFRNINEIIKNIHSDSANNIREEIEKGIFLPRITSVENSQIPHQFNAYQLEIILNNSAKHYPFLNKKEEGLTLKEKIIKLLTFRVPYYVGPLSDKHQIDSKKGGFSWIVRKSNKEVLPWNLDKVIDLEKTAEQFILKMTNKCSYLIGEDVLPKQSLLYEEYNLLNHFNVIRINGERLSKVEKEALIENIAKKRVNVTYQTIAKYFDNRLKKDVTITGIDEEMKLSLSSFHKFNKIFPGRINNEPQNAKLMRNLEKIVFLGTIYSSQVDFTNRLKSDKEFNKFFSTEEISKMANLRFKGWGSFSRLLLTGFDELSKSNDKVITYQDEKTGNELSIIEIMREEPLNFNEVLFHEKYQFSKLISEFNHEGDSELSVDELIDNYYVSPAVRRSIRRTLKIVDEVIATNNGIIPDKIFVEVTREDEKTRKGKGRTDSRLEKMRNIYKKAIKDAEEFRVLLDEISKDDKNDDYLRPKKMYLYYLQNGKCAYTGEPLNLKDASIDHIIPRSLVKDDSFDNLVLVKDTVTNQRKTDEYPLNFDIIQKQKPLWLKLKRNGLMSNVKYEKLTRTRELTAEDFEGFVNRQLVITNQANKAIAEILKTKYGVSTIVYSKASNVTDFRQKFNLIKGREINNAHHAHDAYLNIVVGNYFNTRFGARYYYRDDKKFKWNPKTAFNFNVGGCWDKDKDLGTVKKMLNRRDILFTRMPIIETGQFYNQKASKAGDNLIPIKEKGPLSDTTKYGGYSDKKTAYFAIIEHTAGNKRERIFIPIPVIINQKIIQKQTTLVEYLKTQLKLVEPNIIYSPIPINTIVKRGQSLQFISGVQGSGATHLIVRNMIEPYFDDLTFEYLCLINKYFERKAAAKVTNEDEQLSRENIEKIQVIFSFNEKEKTRKNDRLRYITRDKNEKAFECLIKQIEKPIYEKSFGSRREKILENMEKFYDLKLVRQVEIIRALHEFLKTGVPAIKIKLEELGVKSGTLTMSYKLEDMTIVKQSITGLYQKEIHIKEV

SEQ ID NO: 643 - protein, 1347 aa, synthetic construct
  REGION 1..1347: note = MG44-258 effector
MNTFEKAKTAEQRRNYRSTRRRLARRKQRVLLLQTFFAEEVAKKDPTFFLRLNNSPYFKEDKHHSLQDTKFSLFNDKDFTDKDFHKKYKTIYHLQNDIISQPDKKFDIRLVYLAVHHLIKYRGNFIKQDENINVAEFTNSLVTDAFQELAHYFEDTDLIAAQNFFVNENVRKYEAIVSDKTNGGLKRATDKIFEQFEIKDKTLKTLLSLALGKVTRLNQIFSDEIVDDEQGKITIDFKSISYEEKYNDIKTVIGEVNIVLIDELKRLYDYFVISRLMDGKTLVAEAMVEKYEKHRSDLALLKKIFREHASKEDYRKVFTTLYTTDDKGKKKVITDVNYPRYIGKKSPYVIVKKGDYADFKKFLNKMFKDLGLLSLNDVIKVQEGLDDETFLPLINSKDNATIPYQFNEYQLRLILENQSKYYKFLNEKVDESSLTTLEKIMSIISFKIPYYIGPLVAEDNHPFAWVKRKSFEKVTPWNFSDVIDEATSASRFIERMTNKCTYIPTEDVLPREAILYQEYLALDVLNNLKINGEAIDNYAKQTLLTALYSNKTPLTKKRIATILAKNKNDVVAVSGIDDDVKLAFTSLHKFKAILGENQDLTIEDMEKIIFYRTIFTEKKMFNKKVDELLGHRLSEELCKKIKQLKFKEWSRFSNAFLTGFSKTLNKPVLFDEKTGEVISIIDIMRNNVLSLQQVIHHEKYGVLEALNKYNESMKTNENAFEDVYNLYLSPSVKRPVIKAIHLVDEIIKANDNKLPKKIFLEVTRHDDFARKGTKTISRKKQLDDLYKIAVKESKDLKDLMDELNKKTDADLRSRKLYLYFLQHGKCLYTGNPIALENLVMGDYDIEHIIPQSLITDDSLNNICLVESNINKAKGDVYPLPRTIVNVEKMKPFWERLMKRGFMSESKYQRLIRMSELTEEERFSFINRQLVETSQANKAVAKILEDRYGKGSVVYSKAQRVSDFRHKFKLLKQRDLNKAHHAHDAYLNIVVGNYNDAQTRLAYINKQTGKNFKFNPATAFEEKSFLDVWDKKSNLATIKAVLSRKNILFTQGTYISKGEFYDQQLSPAGEGKLTPVKESGPLSDTTKYGGYSSLNTSHFALVEIPKKRGSERRLIQVTRLHFAKIASGKMTLEEYLITYVGLENPKVIIDVIPLNSLIKRGKTIRSISGFDSGNTLIAHNHQEPFFSKDIEDSYYYLNRYLREIELREKEDTELLTSNEPYTIIIGNRNEKEKVQKIVISKESNEKTYLELAMHFAKDIYEHIFRGVNDTLLSNLDNFKTKSIYEQANIIKQLVMLLQTGALPASINLTSVGLNKSINRNRNINLIEKGDKLLIQSITGLYDKEICLA

SEQ ID NO: 644 - protein, 1193 aa, synthetic construct
  REGION 1..1193: note = MG44-259 effector
MFSADKILGFERIVKDERGINDTKKALKVLFNTKEKIVVNILDFIANGKVKLKKMFDNLELTEEEEKFEIDFSVEDFEAQYVEVEAIIGEEHIVLIDAVKQLNDYLIVARLMNGEKYVAHAMVKKYNKHKEDLRKLKKLIKENCGQEQYNSFFKAADQEYNYPAYIGMTKIKGTRHKTKKIVKPSEITNFFTNIKEIIKNIKSDSANNIREEIEKGIFLPRITSVENSQIPYQFNAFQLEKILNNSAKHYPFLNKKEDGLTLKEKIIKLLTFRVPYYVGPLSDKHNVDNKEGGFSWVVRKNNKEVLPWNLDEVIDLEKTAERFILNMTNKCSYLIGEDVLPKQSLLYEEYNLLNHFNVMRINGERLSKEEKEALIENVAKKRVNITYQTIAKYFDNRLKKDVTITGIDENVKLSLSSFHKFNKIFPGRINNEPQNANLMRYLEKIIFLGTIYSSQVDFTNRVKSDKKFSKFFSTEEINKMASLRFKGWGSFSRLLLTGFDELSNSENNDKALTYQDEKTGNELSIIEIMREESLNFNEVLSHEKYQFSKLIGKFNYTGKSELSVDELIENYYISPAVQRSIRRTLKIVDEVIDTNDGIIPDKIFVEVSREDEKTRKGKGRTDSRLKRIRKIYEKAIKDAEEFRILHDEISKDDKNDVYLRPKKMYLYYLQNGKCAYTGEPLDLKIASIDHIIPRSLVKDDSFDNLVLVKDTTTNLRKTDEYPLNFDIIQKQKPLWSKLKRNGLMSNVKYEKLIRTKELTPEDFENFVNRQLVITNQANKAIAEILKVKYGRATIVYSKASNVSDFRQKFKLIKGREINNAHHAHDAYLNIVVGNYFNTRFGARYYYRDDKKIKWNPKTAFNFSVKGCWDKDKDLGTIRKMLKRRDILFTRMPIIESGQFYNQKASKAGDNLIPIKETGPLSDTTKYGGYSDKRSAYFAIIEHTAGSKRERIFIQVPVIINQKIKQGQTTLLEYLKTQLKLVEPNIIYSPIPINTVIKRGQSLQFISGVQGKDANQLIVRNMVEPYFDDFTSEYLCLINKYIERKKETKKTNKDEQLTEENIEKIQVIFTFNGEGRTRKNDRLRYITRDKNKRAFECLIKQIEKPLYEKSHSDRRKKILENKEKFYDLKLVRQVEIVRALHELLKSGVPPSKINLEELGVKSGKLTMSYKLKDMVIVKQSITGLYQKEIHIEEV

SEQ ID NO: 645 - protein, 1339 aa, synthetic construct; identical to SEQ ID NO: 604
  REGION 1..1339: note = MG44-260 effector

SEQ ID NO: 646 - protein, 1339 aa, synthetic construct; identical to SEQ ID NO: 603
  REGION 1..1339: note = MG44-261 effector

SEQ ID NO: 647 - protein, 1353 aa, synthetic construct
  REGION 1..1353: note = MG44-262 effector
MKYYLGLDIGTDSVGAACTNEQYELLRANGRDAWAVRLFDEAKDASERRAQRASRRRTARREYRIDLLQEIFAPFMDDPAFFIRLNNSPYLLGDKDTALKSKYALFADEDYTDKQFYAEFPTIFHLRKALIDGNRKRDLRLYYLAIHHIIKYRGHFLFEGQDLSAVRDLKLLIESLNLALADDDIEEWFDPSLSEKFYDVATDISKHAKDKAAAAFELFNAKSDSRKKALIQLMLGLSAKPKDIFDGRDDAKGMKFSELDEQSFAALEADFGDDFAVLQALKAIYNYFVLEKLLRGHEYVSDAMIAIYDKHRIDLAKLKELVKTYCGRDVYYKIFKSASTENNYASYVGFTKPQRRKIKVKKVKKTEDFYSFLKKILSENIKAEEAKERVDAVIGETEERNFLPKIINADGGRFPYQLNLQELKMILAGLERDYPQFSVKDDDGLTPCEKILKLLTVRIPYYVGPLNNYHGDNGETVGKGNSWVVRKKGRITPWNFDDMVDKAASNEKFMRRMTLKCSYLHREDVLPKFSVLYQKFNTLNQINKLKINEQPISAEIKKRLFDELFLREKKVTDKKIVVFLVNCGLIAQSSASSVKISGRAEGEYPSMSSYILFKTILGDFVDERPDVIENIILWHTLNTDKDVVGGLILKNYGNIPQIKENIGKLKGISSFKDFGRLSREFLDGLPAEIDPTTGEVVTIIDLLYETNCNLNEIIFDKRYGLEAKIAEINGGLDEGVTYKDVEALYVSPKVRRGIWQALKMTEEYVSEFGAPEKIFVEVTREHSKDKKTTVSRKNRLLEIYSNMNKPDEKEANDFLMEALRNESDLRLRQERLFLYYKQLGRCMYSGEVIDLADLASDRYDVDHIVPRSITKDDSIDNKVLVLRSKNSEKSDVYPLADGFTNQRPFWEILHKKGLMSDKKYSLLTRKNPLTDDDFNFIARQLVETGQTAKAVCELLARKYPQTKIVYSKAKNVSEFRQRYGLVKCRETNDLHHARDAYLNVAVGNVYDVRFSDYRSMFYDKNDEKRRINLEKLFDRDVCGAWTAGSSLKIVKENCRKSSMAVTRYTFTEKGGFYDQTVYKKDDDGITVPRKEKGPLSDVGKYGGYKSQKTAYFAIVRSKDKKGRFKKSIEAIPVLTSYKSKDNPEEVVKYLKDKAQLIEPELLVPKIRKHTMMRIDGTPLWISGVTGKRILFYNAVEWYTDPKTDEYVKKLAQLKEMGASKEFDKEKEKESYEMITNRKDERRLVIDRESNLRLYDSIIEQLGKSVYGVQPMKSFTQKLVDKRETFAKKKVFEQAVVLLQCVKFLKCNAEAADFTLLGEGARCGIILIGQDITDKTVSIVHESPCGLHRHIKKI

SEQ ID NO: 648 - protein, 1344 aa, synthetic construct
  REGION 1..1344: note = MG44-263 effector
MKDYYIGLDIGTDSVGIACVDEDLNLLRLRGKDGWAVRLFDEASDSSERRMKRTGRRRLNRRQYRIGLLQELFGPHLKDPYFFLRLKNSPYVLGDKEKAARTKYTLFCDADYTDKEFYREFPTIYHLRRKLMTADKPYDLRLYYLALHHIIKYRGHFLFEGDAADAGENLSELLSALNVGICDTNEEWGIEFSVDKVAEFEKIALSNGGKSDKKREANNLFGADTAQKKALIAAMLGSKVKLKDLFDSEEFGDSLDFTSNDDAKLQEFIDKTNDEHGVIASLKAIYDYFSLRRVIGDAPCVSEAMIRIYDKHKSDLQLLKKFVAENCGKEAYCKLFKSPNEPCNYAAYIGYTKPQKKKINVVKKCVKYTDFLDYLKKFLKAEFSGGDTETYAQISAEIENEKFLPKILNADNGRFPHQINELELKAILAKLKKFYPEFAVKDENGLDIADKILKVFQFRIPYYVGPLNTYYSDKGGNSWAVRKKEGRIMPWNFEDMIDLAKSNEKFMRRMTAKCTYLLGCDVLPKNSIIYRKFDTLNQLNKLKINGVPISVELKKKLFDELYCKDKRVTERKIKDYLILNGLMSAEEARQASFEGMTSVSAPSMSSYIQLKEILGDFVDSHPQEIENIILWHTLNTDKKVVENIILQHYGNHKEIKENIAKLKALTFVDFGKLSKELLTDIVGGADPVTGEAFTILERLYNTNDNFMMLINDKRYTFGSQIAERNSGSEEVTYKDVEELYISPKLRRGVWQALKMVDECVAAAGRSPKKIFIEVTREHEEGGKATESRKNRLIKLYEAHKDAEDIRKFAESLSGKTDFELRQERLYLYYAQLGRCMYSGEPIDLSLLSGDTYDVDHIVPQALVKDDSLENKVLVKRSCNAEKRDAYPLPSKFLSQKSMWEKLHAMKLIGDKKYNALCRREELTDSDYKGFIERQMTETNQLVKAVAELVERKYPESKIVYSKAKNVSEFRNKYNIYKCRETNDLHHARDAYLNVAVGNVYDTKFSNPESYYHSVDGRRKMYNIEKLFDYDVEGAWKKDESLATVKAVCEKCTPIVTRFAFTSSGKFYDETVERKGSSSISVPRKSDNALKNTDNYGGYTSLKTAYFSIIESDGKKGNREKYIVAVPVLIDYKLANNKTTLLEYFTSIGYVNPKIIVPKLLIKSLVKFDGMPLYIAGTTNGRLKCHNAVQCFTDQATDRYVKALSKLADMVKKKWESEDKPSYEIHVNRLGKVSLSITAEKNIELYDWILNKLSEKIYSADPIKTFLKNLRNGRDEFVKLSVFNQAQIILSCWDVLRGDVNGANLKHIGKGANCAVLSLGNNITDKQVEIVHLSPCGFTSRIIKV

SEQ ID NO: 649 - protein, 1337 aa, synthetic construct
  REGION 1..1337: note = MG44-264 effector
MSNNKNYYIGLDLGVASIGWAVIDENDRVIRKRGKKLWGVRLFDEAKSAEERRMKRRQRRTISKRAWRLSLLKTELSKFVLQEDPNFYERIRKSQTKPEEGYFLFDGEYDDVKYMREFPTIFHLRQSLMDPEKVKNYKKRNIYYRLLYLACNDILKTRGHFLTEGKFSTKNAASKENIINSSKILIEEINEEAVILDEKVIISSLNDILNKNDNINKRRQDPSTTFLKAILGNNFNINRIIKFNDERYAHTFNDLEWEEKLTEIDEIDSLLYSLFDIYSMIRLFMVLGDEPNISSAKIKIFENHKIQLAKLKSDIKQIDQKLGTNYFHELFLEKNDKKTSYSNYVGKIIIEGKKERVSKSTSYEDFIKKLISIKNEINKEVKNNKFLLDIEEEGYLVVPTNADNRFIPYQIHYSELDSILAQFVMLEQTEESKAIKERMLKIMEFKVPYYVGPLSNKNNDEKGNYWIVKKEGFENVKITPFNFDEVVDKQQTNEQFIKRMLRSCTYLYDEFCLQQETILYQEYIFYNTINKIKVNDAYLNNEQKEILYNALLSSGTLSKTKLVSLLNMKGAEVTGFSRTDEKKPLAISLSAVKRFRDIFPDYIHNKFYQSFYDDVINEVSFVDDNEIENKKKTIKRILKSYKTVEITEEQLEKLTRVKSQRWGNLSYKFLNELLLLKSEKTGEMDTVMNILRNSNLNLMEILFIGNNMSIIDNENDTDVDLSTHENVHDYLKRKYISPQARRAIIQTTRVVDEIIKIMDGKKPRNIAIEFTREDQVRKRETNPRLKELQNAYKNISDDYAEVLSHLNDLEKNKKEDKLRAKKIYLYFLQLGKDIYTGEPIDFNILLRDKMVYNIDHIFPQSRIKDDSFDNIVLTKSVINGEMGNNYPIPKNYQDKNKAFWQYLNKKGLMSIKKLERLTRTTPLTNQELEDFVNRQKTTLDWVNKETAELLKLKYAPKKKAYDFIIFSKSRHMYEFRNKFELYKFRELNDFHHAHDAYLNIVIGRHIKKNLFVDFQGKFRTYNYTRIIERIDNQTIAYIKKIFTHHDVLVTKRTSINNKGPYWDEQIVAPKKDGKNPNLIPIKKGMDVNKHGGYRGASTAFFTALKTDKDTFIMPIPTYHCSRFYDNDMFNQEKFKEYIKKEFPNHEVIEPIIPITQKVLVDGVPLLLAGKSGKAIVFHNTGQLLLDIKIETYMRNLMRIFRRYKGTKLTEDILETNNIVKVNKEDNLKAFEEITNRLKVGTEKHKIFSQHILTKVLFSENYLKDFSSLSLLEQYTNLVIIITRLTKANSSNKGKLFDKNYGDYPRGQKVNYNFSIIKESITGFYSKKIDIHVQNSPN

SEQ ID NO: 650 - protein, 1417 aa, synthetic construct
  REGION 1..1417: note = MG44-265 effector
MQDKKYFLGIDMGTDSVGWCLTDQNYKIIKKNGKSLWGVRLFKEAKDCSERRLFRTGRRRLARRKERINLLRDIFTPEITKLDKNFFMRLDYSKYYLEDRPEEIRKDKDYLFPNDRFGNNEKYFKKYPTIYHLRKDLITNDKKMDLRLIYLAFQHMIKYRGNFLSQGVEFKSKDNDAIRIAFEEINERINEIHNDDDEVLFFDTKTLPNELVKLYKSSKSINYLKKSLKETFNKENDKYLGVIFNLIIGGSVKLKDISFGADIESTDSICVANADFDSKYTEAGAFLDDVYMDILKNAKSIYDQLVLKDILGDDKFISDVMINRYNEHKEQLKQLKNYVKENYDGKTYDEVFRLYTGKDSVNNYAKYIGSSSSKKASIKRFAHCDRDEFYKFLKKELDIETKAKSGDEVAKQILNLIENKRYLLRQNSSENGTLPYQLNKVEMEEIIYKQSKFYPFFNEKDKDGNLVKDKIIALLEFKIPYYVGPLDPASKDEEHHKLSWSIRNPGYEHTKIVPWNFDKVINKEASAEAFIRRMQNKCTYLHDSYCMPKGSLLYGYYTVLQDLNNLTFNGDKIDEKAKNYLFKELYLKKDKVTTKDIKNVLNIYFDKDVTIGVKNGDIDNFVLNGSLKSINIFTRIFGSLDVVKKYYVDIEKLIIDLTLFEDKSIIKDRIKNTELYSEDFVNFISSNPKYLASIKGLRFEKYCSISRDLLSLKGVIIDENGVINYTENNVIEIMDKEGINLEEIINRKEFVDAINLKNEDEEKLDFKNDKSLKDYIDNLYVSPGMKRPLLQTVKIIRELEGIIKQPIDNFYIETTRTNKNKKKGQKQESRRDKLLKLLNSEAKKIVSDIQGSSSAAFVDSLTKEDDGRLQAKKIFLYYLQCGKDVYSGQPIDLNNLNNYDIDHIIPQARIKDDSLQNTVLVSKDLNNSKQDYYPIPNSIISSEGRNIIEYLHRNKELMSDIKYERLTRSVNKPLTEDELQTFANRQLTYTNQAVKALCDLIKKKKENAKVVYCKAENVTDFRRDFDLTKSRLANNFHHAHDAFLNIIVGDVYDKYFTEQFIYHNYYKYESANLGKFLKPCDGKPDKNGQIKSETILKNKKGEVIWQSSKFVPYIDKVVKTQFDIMVTEPTYFKKSGFYKQQILPKGNNLIPLKSKDSIIGDVNKYGGYQKPEYGFYDIIKETKGDIKLVPTPVYFGKNPSSSSIKLNTILKRDDSYCRIASVTSTSYNINKGFEPHFEYKAILIIKKINVFADILTENKMFNISESCSEIGSDKNKDFLYKANQIRGFKIEDEKVLLNNSSNYFSYVSREESNFLLDYLLKFIKKSEALYSLFSNCIRVFNKSNFDKIGQCPLYIALFLEYQLLLLLQRTKLTADFSLIGLGEFVGNTCLGNKLVKGDKFYSDSITGFYRKLIYEVR

SEQ ID NO: 651 - protein, 1329 aa, synthetic construct
  REGION 1..1329: note = MG44-266 effector
MAKVKDTYQIGLDLGVASIGWSVVDDNNKLIRKRGQNLWGVRLFDEANTAAERRGFRRQRRTISKRIWRLNLLKNELKSFVIKEDPGFFGRFSKSQIKPEKYMLFDGKYNDTTYMREFPTIFHLRVALQSEKKCLEYIKRGIYYRLLFLACHDILKTRGNFLSSSSLGGSTGNSKDSINQLIKNLVTLIHEIDENSELDYNFIRKALTDHLSSKERINARKSDKNTTFLKAILGYKFDLNKIVYFSDEKLNFDFNIETWDEQLTNDESIDGILLELFEIYKNIKLNVLIGEHKSLSYAKVAIYEKHKKDLFALKRDIKKVDNNLNSNYYDDLFLTEGKKVSYTTYVGKLLINKQKIKIKKETSREDLVKKLVTIRKEYQDKTNDLKLLSYIEEEDFLIIPTNKDNRLIPYQLHFNELEVILNQFINITNSKEAIEHAKNIKILLKFKVPYYAGPLSNHASDEMSNYWLIKKENHKNSKITPFNFDEVVNKRETNKAFIGKMLRKCTYLTNEICIQQETTLYQTYIFYNTINKVKVNDINLTKEQKQILFNNSKSGKTLTKSRIISMLGLPKNSDLTGFSKTDEDKPLQISLSAIKKFEKIFPEYKNNPFYMSFYDDVVNSISLIDSDELDVRREQIQDIIDSYKTIIISNQQVDELASVKSSKWGNLSSKFLNEVLFDDGEGELRTMLETLKDSNLNMMEILYKGDNQLTLDRLNNNDFNLSDSNGLHEYLKTRYISPQAKRTITQANLIIDEIIKIMNGVKPTKISIEFTREKEIYKKETQSRFKQLSEIYKNLESENIQVINELGNLQKNKEEDKLKSKKIYLYFMQLGKDLYSGKSIDFDLLMSNSKFYDIDHIFPQSRIKDDSLDNLVLTSSVINGEKNNIYPLPKEVQDNNKDLWAYLVNKKLISQKKYERLTRITPLSDYELEDFVNRQKTTLDWINLEIANIFNIKYNETNDKNFIIYSKSRHVSAFRNTFNLLKFRELNDFHHAHDAYLNIVLGKAIQKNLYINSDGKFRTYNYERILENTLEDQIKYIQDIFKHNDILVTKKTKINSQGAFWDQNIVSAKEPGKNDGYAPIKNFLEVDKYGGYNGVKTAFFTILDINGKKVIEAIPTVDCSNFYDEEMFNNQKFEHYIASNYSNATIIVPIIPIGQKVLLEGVPLRIAGKSKNSIIYHNSSQLVLDKNTQEYLRQLFSIQRRFKGKKIEENIWLSAGLTKEMNINAFEIILMKVNRLAETHKLYSKHTIDKINGSGDTLDEFMGYSFIDQIETLIMIITKLLKPNSSNQGRLFGTTYGDMPRNKILTSKGISVVKESVTGFYTKIINIDV

SEQ ID NO: 652 - protein, 1450 aa, synthetic construct
  REGION 1..1450: note = MG44-267 effector
MNNFAEKNKSKVGDYYLGLDVGTGSVGWAVTDKNYDLVKINGKTLWGSRLFETAKTAAERRLHRNERRRTMRRSQRIDLLQGLFDEEIVKVDPGFFQRLNDSNLHKDDKSEVQIYSLFNDRNFNDRNYADEYPTIHHLRKQLMSSAATDIRLLYLAIHNIIKKRGHFLYENFNVENSQAGFSEIWQSCCSLYVDAILPNDERNITNDDQLTEKNVALKNMLYDLEKSFLNVLMKSDDKKKDLEILLKDVLNDCPELKKQILKFRDMLCGYTVSIAEMFPVSEDLVEELNKNKISFKSADFDEKLLALPEEYQEIINSISAVYNFARLQLVLNGKKSISEVKVKIYEDFAKDLHTLKNFIKSKMTDSMMSEVLNYNIIDENGNSKKDGAIEKEHNIFFIKNFSFEECKKNFYKELFKEPKNKNVKKDDRSFFYNISHGQRDTALTKDLYKILKRLCGYIEGNNCCELNDDEQELIGKILNDTIFTKSVSIDNSVIPYQLNLYELNLILENSRANFSFLGKTDENGISVVDKIKSILTFRIPYYVGPLNQHSKFSWIVKRSNEKITPWNFEKVVDKSASAQRFIERMTSKCTYLKNEDVLPDNSILYSKFRVLNELNNLRINGCRLENIEKGLVLDIYNNVYLNKSKVTIKHITKYLENKNYASEFVITGIDEELKSAMSSYVKIKAALSKVDIPEDKLEDVMENIILWLTVYGNEHEIIEERILNDYKDLFATHQDVVKRIAKLKFSGWGSLSKKLLSGVFGKLTESENQDQSIIDLMMHGKGNLNELLSNKYTFSQKIKNININAGIINSTFSYEALVQDLYVSPSVKRMIWQTLLVVNELEKIMGYPAKRIMIEMARGASENDTKPGNKTVSRKNKLLNLYKSCQKDQAFLRVDELQNRLSNETDSRLRSDRLYLYYTQMGKCMYTGESIDLAELNNQDLYDIDHIYPQSLTKDDSFDNRVLVTRKSNASKGATYPLSAQIREKQHYFWKSLKDKNLISSIKFERLVRSTELTSEELASFISRQLVETRQSTKVTAHLLEDLYPQTEIIFSKASNVADFKNFFGLIKVRELNNLHHAKDAYCNIVVGNVFYEKFSKDPYYILNSKKQEKYTFSVGSKSYMFVNEYDFRLQERGVWDARAQKSLKTVIKNYSKNNIFLTVQQEVTSGALFDATRYSAKPALMPLKKGLNTDLYGGFKSVSTAFFSLIKYTKKKKECIQVTPIPIYISNKDGDLIENINNYLIDECELSNPKILISCLKMPMCFRINNTDFEFLCNGYSGKQLACKQNNSLILPPNYAFILKKIIAFNSKCINDKNYIYNVRIDKFCENDLTALFEIFKSKMENSVFKYAPLAVYGVIKDKSLDDINYKSLVTNKNYIEHERIVNKIKILLEILIFFQSNGATSDMRLLGGASQAGKFMLNATFNTDKVDYLIVNKSITGFYKEEIRINDL

SEQ ID NO: 653 - protein, 653 aa, synthetic construct
  REGION 1..653: note = MG44-268 effector
FDDGEGELRTMLETLKDSNLNMMEILYKGDNQLALDRLNNNDFNLSDSNGLHEYLKTRYISPQAKRTITQANLIIDEIIKIMNGVKPTKISIEFTREKEIYKKETQSRFKQLSEIYKNLESENIQVINELGNLQKNKEEDKLKSKKIYLYFMQLGKDLYSGKSIDFDLLMSNSKFYDIDHIFPQSRIKDDSLDNLVLTSSVINGEKNNIYPLPKEVQDNNKDLWAYLVNKKLISQKKYERLTRITPLSDYELEDFVNRQKTTLDWINLEIANIFNIKYNETNDKNFIIYSKSTHVSAFRNTFNLLKFRELNDFHHAHDAYLNIVLGKAIQKNLYINSEGKFRTYNYERILENTLEDQTKYIQDIFKHNDILVTKKTKINSQGAFWDQNIVSAKEPGKNDGYAPIKNFLEVDKYGGYNGVKTAFFTILDINGKKVIEAIPTVDCSNFYDKEMFNNQKFEHYIASNYSNATIIVPIIPIGQKVLLEGVPLRIAGKSKNNIIYHNSSQLVLDKKTQEYLRKIFSIQRRFKGKKIEENIWLDAGLTKEMNINAFEIILMKVNRLAETHKLYSKHTIDKINGSGDTLDEFKGYSFIDQIETLIMIITKLLKPNSSNQGRLFGTTYGDMPRNKILTSKGISVVKESVTGFYNKIINIDV

SEQ ID NO: 654 - protein, 529 aa, synthetic construct
  REGION 1..529: note = MG44-269 effector
MAKKFVNKQTGLVFNIIDLLRDTNQNLMEILHNQEYGLQDILSEENEYTTQGKDITFEDVDSTYAAPSVKRAVWQTMLVIDEIIEAVGRSPDKIFVEVTRYNLEDKKKKRTHSRRERLKELWENIKDLKDDIEKELENTTDNQLRSEKYYLYFLQNGKCAYSGLDINIHELTNDSLYDVDHIIPRALLKDDSIDNKVLVKRVINKKKSKTYPLNLCDEIWNQKQHLIHMWKSWHCAGLITSEKLSRLVRTTPLTDNELEGFINRQLVFAGQSAIVVAELLKAKYGQSRPTPCEICYSKAKNVSDFRNAEWVKTNDPNEKEKYKLYKSREVNDFHHAHDAYLNIVVGNVWNTRFNHVNIRKYYAGQQDIKNNDEKIKNTKTTKISQNNLFNYDIKDAWVKEKSFDVVKKMLSIKDILVTKKAESNSGALYNQNVRGVTVRQKQLQTKGQYSIETTESLIPRKTNPNNPLSDTNKYGGYKSMTPAYWSIVQYDLITQKEKGGKKNKHFEYLKSTGRVFISIPLLYKKTPGK

SEQ ID NO: 655 - protein, 1437 aa, synthetic construct
  REGION 1..1437: note = MG44-270 effector
MENNGKYFIGLDIGTNSVGWAATDKQYKLLRGGYRKKLMWGSHLFTPALDCKERRLFRCARRRLNRRKYRIDLLNSLFIKEIAKIDDTFFDRLHDSSLHLDDKKVKTKFPYFGNKESEKKFHKDYPTIWKLRLELMKNNPNAFDDIRKVYLAIHHIMKYRGNFLIEGDYKTDDIKKFDKTLVDTLNEAFRETVSFDEDGNISVDLINAIELEKLFTNKKKINKKDLKKALTDNVLNQDKVYKDIVKELTLALAGSDFDLNKLLNIESEEKKKINLSKYDEERDSWQEIAEDAIAVIDSLHKIYSWRQVYLLLQGKSTLSQSFVEIYEQHKEDTHLLLKVCRDIDSEIKPSKSFYQLMFKDEYDSSSKSNTKKDLLNNYRNMSKHRGGVKPVEVQKFIKKVILESEECQIFCASNPNSLLSKNINTLAGRINEEDSTFLFYPSIKSTSAIPNQLHYLELEQILDNAVKYPHLKFLENEITKIKNLFKFRVPYYVGPTPIVKNSKNPQFTWSIRKSGHENEKITPWNFYDVIDIEKTRNEFIGRMVRKCSYLPSENCLPKSSLLYEEYVALDTINNISLDGKPLDKELKKGIYGLALSKGKVTYKNIKDYFSEKNIKESMSGIDNDASISLKNNKIALSIFPDIFSDTKQGHNHYEIIEDIINMLTVFGDDLRDAQKSIEKKYCSELTSEQLKLVTAIKTESYGRLSRVLLTSIHPTCSENGEVDMSGSIIQEMRDTNSHFMKIISSPEYSYAIKLFKDNHSSVDKMKIESMLDSFPSITRRAIKQSLDIVKEIKHIKKGNPEKIFIEVTREDDVKKKNKKTKSRFDSYQVLLDELNQDKNKSEKLQAFCKKTNLDIDSNNLFEEAKKSNENGSINGERVYLYLKQLGIDLYTGKKIDFEKLISADGNTDYDVDHVIPQSLTKDDSFDNKVLTKRDINQKVKGDIYPLPLSLRKADNIVIWKFLRSKNLMSDKLFNSLMRVTPLSEDEIGEFENRQLNVVNVVTNAIRDIFHELYPETTVVFSKASNISDFRQEYNYLKCRELNDLHHAHDAYLNIVVGNVLDEKYTKDLPTIIRNKYEDLKNKLISKSLNETKNSESTSFKLINCFRAKALSNKHGELYWDRSYHDLIKRNLLSATPIVTIKTEVNHGAYYNQKMIKKGDGLMSIKKSKIDTTKYGGYSGVAPAQFILCQTIDRKGKIGKRLFSVPVIYNQYIDWKELKNVNLVDDPRFVKFTDCSKYTKIELISTIPLYTILRFSNLKLALSGWDGIRKLSTWKLDNCVIKNQEQIEYLKALVKNKSKINSEMKKIGNDVPFDFSYSLQRKNQKGQLVEFKINREQNISLVKEFFSGNEKSFKSEYFLDKDNTFEEAIHKFSELSFSAQFEILLSILKAISKTGYGDLGSLGLWKAAGLISPNINLSNSNYLEFTSPTGLYFKRTKL

SEQ ID NO: 656 - protein, 1023 aa, synthetic construct
  REGION 1..1023: note = MG44-271 effector
KIVKKYLTPEDYFAIFKKYHETKGENYPSYVGMLKMGKRKYSPAKADYETFTKFIKRKLKNVPEAEKIIDKIDKGIYMPLQTTKENAKIPFQFNEHQLNIILNNQSKFYEFLNITDDDSLTPSQKIMSILRFKIPYYVGPLVDKSEFAWVVRKSNEPVTPWNFDKVIDIDQSAEQFILRMTNKCTYLKLEDVLPRESLLYEEFVMLNLLNSIKINDEKIDVQLRAKIIEAITKEGQTFTLKSLQKFIGNLNPSFDGDIIITGIDSDAKLGLPTKTKLEQIFGPTSPNREVLEKIIFYATIFEDKKIYGRKVTELLKPEKLGKRVLHQVRQLTFNGWSRLSKAFLTGYSAFEGRAVLTNLETGEVTSIIEIMRENPLNLQEILHNDKYNLQEALDQYFLNISNEQTLLEEIQSMPLSPSVKRPVYRAIRMLEEISVLQNGIAPSKVMIETIRGRDDKRQGKKVPSRLKQLQELYKAAEKQTDEIKELQVDLNTKLTDYDLRPRKLFLYYLQMGKCMYTGKRIDLSQLMTSAYDIDHIMPQSIVKDDSLNNICLVLKDANMAKGSDYPLNNDVITNMKPFWTTLRNNNMMTKEKYERLTRIKLLTEEEYYGFINRQLVEVSQATKVIGQLIKKYFPKTTVIYTRARQVSDFRQKFNLIKVREINKYHHVHDAYLNIVVGNYYHEHFKMKRFTKDTARYEYNAKNLFDVSLGNYWNKEKHLPLVLSIFNRKNILITRQPFVNKGEFYDQNLSKASEANRAPIKESGPIKDSAKYGGYSGNNTSHFALVEIELGRNKTERRLVPISVYDANNISDSDLLSHLKELVGKESIKIIKKVIPLHTVIEVNNSVQYLAGISSTTQLNIQNLAEPFFPVNKIIYFDLLQKANALFVANEHLLSLDINEFAVLPTRESEGTIDSNLNKKFYDYIIEQFEKPIYANVFPTSNVVMNLRENRETFIKFSLQKQTKVLIDLVSLLQTGPLTKVDLIELGLKSSINRNVIGNLVKPNSKIIKTSLTGLQVKKIKISV

SEQ ID NO: 657 - protein, 1472 aa, synthetic construct
  REGION 1..1472: note = MG44-272 effector
MAKKYLLGLDLGTDSVGWCLMDESNHIIKKGGKSLWGVRLFEEAEDCSSRRMSRESRRRTQRRAERVDLLQSLFAPEMAKVDPTFFVRMNNSALLEEDKETAAKGKDGTLFAGVGGINDKAFYDKFPTIYHLRDSLLKGEEKADIRYLYLVCHHMVKYRGNFLHYGEEINLKSDQEIIEAFHEIDVALEKMAKKPLALSEERISSFLKLALNSFGINDSKRAYYEFLKQDDSFIKNGICPLLAGGKVAVSKLYDLDEDDEPDPKNISVRSSTFEDDFSKLNFTFSDRPETAIIKAAKTISDFILLRRILGSSNSLSDAMVARFNLHKTQLKELKSYVRSHCPELYDRVFRTYDPKVNNYVRYVGMTRIKGKRLRVEHCHREEFYDFVKTEVFKIAKNVEVTDPFVQGIVAQMDNGDYLPRQNSTDNGVFPYQLNLTELKCILDKQAKFYPFLKVKDEEGYSTDEKIISILTYHIPYYVGPLVQQKEGDEHGKFAWVVRTGKKIMPWNFQKGGIIDFDQSAENFIRRMLNKCTYLPNCYCLPKCSLLYSRFEVISFLNNIAINGRPIPAHSTVEGEVSKDLLMSQFCLKGTLTVKGLTAFLKNHFGHFDPELLTTRTGKEIDSIDASMKSYADFVGIFGQSYVEQHLDLIESIINDLSIFTDRDIVERRLRNKYGFTNEKVIRQIKALNYSKFGRLSKELLELTSDVPDLSTGEIRKQTLIDSMYESGENLMEILADSRYSFGAQVAARQKEASYVVKQGASKLEQVKAVVDELYVSPSLKRPLLQAYEVVDELQKIVGHPIDEYYVECTRGSNPKEKGKKKPSRLEDLLRIYGRAKTDSVKLLKELEKKENPSYFDQEMKKQILENGDSLDRCFSELKDQANRHNDMCFRSDKLFFYYTQLGRCMYSLKPIHLEDLFADAQQYDIDHIVPQSLVKDDSLENRVLVYQDYNRKKADVYPLPSGFLAPGAASFYRYLSKIGLIGEKKLGALLRSSAEPLKDEELVGFTNRQLVSTNQAVKGLITILTTFEKVKGKEPEVIFSKAGLVSDFRQKFDILKSRDANDFHHAHDAYLNVVVGRANHEYFRYMNGRGWFEAMHRSKLSTNPSNIFDQNSKEAQAKGHVKAPIKDSQGNICWAFEPSLEQIKRDIYHRFDIMVTVRQFIQPGLFGKATLLKKTAWRDGNLFPIKNNRDPAKYGGYYGLNNGFFTIVELFDKKGKPIPTLIPVLNISARPDEEDKILHYCSGITGQKVGKLLVPCLRINSVIKKGKVVFLLSGKDHLNSASCKTLTEMIFSQEEIRVIRSVSKLCEIIKLKRTKDFSPDREDFDEKLASLLGSPLSADELVISPAANDQRNKAICLTSKEELELYDTLLKKLSSPFFEETGGPSDTAALMADPQKRALFESLSIGKKALVLSEILKETSANSAERANLKLLNGPAEQSKRLLSWQKIGSCQVLAQSVTGFYEKTIFPTKQK

SEQ ID NO: 658 - protein, 1359 aa, synthetic construct
  REGION 1..1359: note = MG44-273 effector
MSNEKLFVGLDVGSDSVGWAATNENYDILRLKGKTAWGASIFDEAQSAAQRRTFRCSGRRYERRKYRLSLLNDMFDSHLKTIDPTFLLRLSESAYTFEDKSQGANQGSLLFLDREKEKDFYTIYPTIWHLRSHLIEGDPKAFSDLRNVYLALHHIIKYRGNFLSESSLDATKFDETVFDRINDFFRSLLAEETESDESDVDFVWIGKDGRQDFLNCLLDKRTNKTEKKKTLKKLLGTNETADPYTDMAIALVCGGVFDLSKLGDGFEKNKIAFGKDFDEKEEEYRGYLGTSFELVEEIKAIYDYVELHEILNGEKLLSKAFANLYDAHKIQLHGDKTKGLSGLKNLLIGIDRKQGNKTPESRFYYKVFKDPNLEKNYAAFVHVGTTKKRPTIHEFNAFVLDILKSNSADVADQKSLLMLENLAENDELLQTIAYRSTSVIPHQLHEKELGLILDQCQKFYPWLFEMKRKILDLFLFRIPYYFGPLDSRSQNSSVVRNSNVTITPWNIDAVVDKDQTRAKFMGSLTNRCTYLREENVLPKQSLLFEEYEILNKVNGLKVNGLFLDKDIKGKLVTALLAKSKTTFSGLKKLLLWFNPNLKKDGVSVSGLNEKDDFVASSHACLAKAFDLTKDYATAERIIFLATIFCDSKIETDRAIRKEFPALSEEQRKAVGSLVCKGWAPFSRKLLTGLKHTDENGVVMSILDVLREENLTFMAVLHDQRFGFEELITEENRKAFGERPTFEVVKEIFESIPPKMQRSTEQAIRIVDDVVKASKRKPNRIFIEVTRNEDEKKKNQLTISRKKELEAFLKGLFKEKAEGIADRAKHVYDELEKRDVSDLKGKHLYLYFKQNGLDLYTGRPIDIGDVLDATKYDTDHIVPQSVIKDDSLDNLALVNREANQRLKGKRYPLPPEIRNNQDVLRVWKILKEKKQLSDKKFNNLMRTTPITDEEIATFVSSQINVVNHSNIAIRDIFAIKYPQAKLVFSKAQYPSHIRQTYSIPKLRHLNDCHHAVDAYLNVVAGNILYEQFGDLRLIKARNSMSEEEREQSFNMERTLERILGLNKLGEKVKNNCYRHDFLLTYRHLYQDSSFYDMTIYPVGAKSGLVPLHTKKGDPRSNVSKYGGYNGLATEYFVIGTKKNGKRVLVSVPHLYASLYKKMAELSAAVAALQGEPGLQLDTSHKIPSNQKVLINGCYYLLCPFNESIVTLKPIVPLFFPVEESLYLLRLQKLLLDDPLFKNLESPEFSFYSDKKKEHKQSVSSQKNVEILQEIIKDAESKKYDFCPMICAIRRFDVSGFAQKKMCDQAVDLFSLISLFGRKSLSLCKNHMNNYFSKAKNAFFSENVISIDESPSGLFEQRRIL

SEQ ID NO: 659 - protein, 994 aa, synthetic construct
  REGION 1..994: note = MG44-274 effector
MRLPFSYIFILAISAEFYPSLKEEDNRYKIENNISLFDAINFTNSDKIISLLTFKIPYFVGPLNQNPNSKNTWVIFKGEKKEKIYPWNFDTMIDKDKCGEQFIQRMLNKCTYLHDQYCLPKNSILFSTYVVLNEINKLNINGKPISYDDKMGLINEVYHRFNKPSIKQIKDYLISRHNGEGEIIITTANDKELDNLTGNIKSYIDFKNIFKDKFSESNLDMYEDIIQDITIFEDKSMLEHVLTKKYKLTKEGVNKIKGLSYSGFSRLSKKLLSGFTVDAFDDNGEMIPTDSIINILRNTNLNLMEILNKDEYGFSIAIQIYNQNELDEYKGTSGIMNYIDDLYVSSAIKRTLIQSYKIIEEVERIIKAPLDEYYIECNRTNMAKKGKNNSRKYKILSMYKEAEEVAKNLGVKERLDAFTTKAKLLEEDKFKSDAIYLYFTQLGRDIYTGKDIELESLNDYDIDHIFPQSLVKDDSLNNRVLTLGKINSEKQDIYPIPYSKIAGNFDHVSFHKLLNKLGLISDVKFDRLTRSYELTDDEIYNFVSRQLIYTSQTEKALKDLILAFKKDRNNKTPLVVMSKAENVHDFREEFDIIKCREANDFHHAHDAYLNIMVGRTLNTYFGTKIEKIKYMHENGFTTNPLRVFMNNKEKTKKNILDKDGNLVWDYNNSIGIIKKNIFENHNIYVTTRTYIGNTLFAKITIKPHGEINDFAWPIKTNGNKAFLNTKVYGGYTDLSFGYYSLFESLDKNKEKIYTLCAIPTIIKDEKNIINYVSTRYKLNNPVKVLDKLKINTVLKCGGSKFCITGKTNMQYLVKNLTQSFFTYDDQAIIKKVVKLNKFVIGNNGLDTKTGLLKDEFVVKYNIDKNANEFVISKSKAGDGIRLMQNELDTLYSKILSHFNNNIFSFYSCYSMLNLFLNNDDEINKIHNLNMFSFSYLIGQLINLLECRRLTGDFEMIGGSPSTGTLLCPAKLPKGIKIVYESITGFYSKIVWENK

SEQ ID NO: 660 - protein, 1360 aa, synthetic construct
  REGION 1..1360: note = MG44-275 effector
MADKLFIGLDVGSESVGWAATDENFHLYRLKGKTAWGARIFSEANDAKTRRGFRVAGRRLARRKERIRLLNTLFDPLLKKDPAFLLRLENSAIQNDDPNKPIQAIADCPLLVNKQEEKDYYKRYPTIWHLRKALMENDDHAFSDIRFLYLAIHHIIKYRGNFLREGDIKIGQFDYSIFDKLNETLAVLFDLQNEDGENEEGRFIGLPKSQYEAFITCANDRNLPKQPKKAKLLSMFEKTEESKASLEMFCTLCSGGEFSTKKLNAKGEETYQDAKISFNSSYDENEGAYQEILGDFFDLVDIAKAVFDYCDLSDILNGNDNLSSAFVELYDSHKSQLSALKSICKRIDNQNGFIGEKSIYVKLFNDPNDKSNYPAFTNNKTLVDKRCDIHTFDKYVKETILPYESSLTGRDAVNWQMLKSLAEQDRLLQTIALRSTSVIPMQLHQKELKIILKNAVSRNIKGVAEIEEKILKLFQYKIPYYCGPLTTKSDYSNVVFKNNEYRPLKPWDYEEAIDWDGTKQKFMEGLTNKCTYLKDKNVLPKQSVLYQDFDTWNKLNNLKVNGNKPSLEDLNDLFSFVSQRSKTTMRDIQRYLKSKTNSKENDVVVSGWNSEDYICCSSRASFNKNGIFNLNNSEVLKECERIIFLKTIYTDSPKDADAAVLKEFPDLTNNQKTLLKTIKCKEWSPLSKEFLELRYSDKYGEIRQSIIDLLRNGEGNLMQILAKYDYQEVIDACNAASFQTKSKSQIVSDLIEEMPPKMRRPVIQAVRIVQEVAKVAKKEPDEISIEVTRENNDKEKKQQLTKKAKSRSTQIQNFLKNLVKIDASEKKQANEVLEELKKYSDQSINGKHLYLYFLQNGKDAYTGKPINIDDVLSGNKYDTDHIIPQSKMKDDSIDNLVLVEREINQHRSNEYPLPESIRKNPANVAFWRKLKKAGMMSEKKFNNLTRSNPLTEEELGAFVAAQINVVNRSNVVIRDVLKILYPNAKLIFSKAQYPSQIRKELNIPKLRDLNDTHHAVDAYLNIVSGVTLTDRYGNMRFIKASQDEEKHSLNMERYISSLIQTKEGQRTELGELIDQTSRRHDFLLTYRFSYQDSAFYKQTIYKKNAGLIPAHDNLPPERYGGYDSMSTEVNCVATIIGKKTTRYLVGVPHLLIKKAKDGIDVNDELIKLVPHKENEVVKVDLNTTLQLDCTVKKDGFMYLCTSNNIALVKLKPFSPIFLSRESEIYLSNLMKYVEKYPNISDENSEYEFKINRENVDPIKFTEKQSIEVVQDLIIKAKQDRFSYCSMISKLRDINAEEMIHSKSLTEQLKIIKSLIGVFTRKSEILSDKNNFRKSRGAILQEDLFLCSDSITGLYHTERKL

SEQ ID NO: 661 - protein, 1444 aa, synthetic construct
  REGION 1..1444: note = MG44-276 effector
MAKKYLLGLDLGTDSVGWCVTDENDKIIRKGKKSLWGSRLFEEAKPAADRRANRTARRRLARRKQRLDLLQLLFKEEIDKVDSSFFLRLNESAYHQEDKSEAIKSFDNLLFVDKDYTDKDYYKEYPTIYHLRKSLLESNDKVDIRLIYLAMAHMVKYRGNFLNEGQTIRAFDPSEGKALFEELNKELLDMELPQLPLQDNFVEALKIKVVAARGIGAKKDALIELFGCSDPYFKNVVFSLIAGGKVATKKIYVNAIDEDTDIDPTDIQLSSASFEESYAKLTELFSSAPETEMIATSKKIYDFLLLGKLLGDSKTISEAMVKRYENHKRDLFALKKYIKENKGKEVYNDVFRKYDEKTNNYVRYVGLTNTDSSKIRCEHCSRDEFYAYIKTILGIDKFKKAEDITDEFLKDVFLKIDDKSYLERQNSSDNGVYPYQLNKQEMDIILTKQAEYYPFLKFVDKDGISTKEKIEKILEFKIPYYVGPLLAKKGDDPRGNFSWIVRNDDKEKIYPWNFDKLVDKDKSAEQFIQRMLNKCTYLPDHYCLPKNSLLFQEYEVLSLLNKTFINGAPLSPETKQELIDNVFKKNAKVSTKTIQKYYKGTTGEDVLVQTSGGKELSEINVSLSSYYFFSKVLGKEYVDSHTNQIEDIIRDLTIFEDSSIVAERLKKQYGISDKQVINAIKNKRMTGWGRLSRELLEMETSYETSDGELTKKSLISLMRETNLNLMELIHDKKYGFEKKIEEASNRFNDTFNTPEEKHAAIIDFVDSCYVSPGMKRPLIQAMAIIEDVEKILQAPIDEYYVECTRTNKAEKAKKNSRKEMLETYYKEAKKIAKTEIEKEIIKRAGEELESIDLGKFRSDKYFLYFLQMGRDMYSLEPIDLTDLGKYDIDHIVPRSLTKDDSISNRVLVYSSDNRNKSATYPLSDANFKCGREKANAFYRFLKSANLISEKKYAALTRTTPLTQEELTSFVNRQLVYTNQAVKALISLIERFQKNQKGEFPKVIYSKAENVSDFRQKYGIIKSRDANDFHHAHDAYLNICVGRAISTYYNRYVQYALYGKKGDENAKAFLAAINSRKASLNLDNVFEEYFDENGVCNRKQLLDTDGNIVWDYSTSVSTIKKNIYSRYDIMVTTMQYIKGGALTKATILPKAGGLVPLKMNGPLSDTTKYGGKTQTTYGFYALVERTSGKKTYPFLASLPNMYCRPDDVLSIRNYLEKNGITINSVILPCLRINTILKSGSSKVIISGVNTELSSFCLKNLSPVFYNADEIVTIKKIRKLIDFLAKQKAPFDLKEKSKEKSLNKIAEVIGQFMVLKEDYLVISPASSNKNEPVYLTNTELNNLYQKIIGCNQKHLNLAKGVLGVLNYLKQNDTFAKFGELPIYLKAYQLMQIVQYLNSAIQRVDLSLLGGGSRAGVLQISANLHSGCSIIVESPTGYFTKTIWKGC

SEQ ID NO: 662 - protein, 1404 aa, synthetic construct; identical to SEQ ID NO: 10
  REGION 1..1404: note = MG44-277 effector

SEQ ID NO: 663 - protein, 1368 aa, synthetic construct
  REGION 1..1368: note = MG44-278 effector
MEQNTKKLFIGLDVGTDSVGWAATDEYFNLYRLKGKTAWGARLFLDAANAKDRRQHRVSGRRLARRKERIRLLNALFDPLLKKVDPTFLLRLESSTLQNDDQNKDQRAVSDALLFGNKKDEKAYYAAFPTIWHLRKALIENDDKAFSDIRYLYLAIHHIIKYRGNFLRQGEIKIGEFDFSCFDKLNQFFDIYFSKEDEEEVEFIGLSNENYQRFIDCAADKNLGKGKKKGDLLKLMSFSEDEKPFCEMFCSLCAGLAFSTKKLNKKDETVFEDIKVEFNGKFDDKQEEIKSVLGDAYDLVELAKFIFDYCDLKDILGASTNLSEAFAGIYDSHKDELKALKGICREIDRSLGNESKNSLYREVFNDKGIPNNYAAFIHHETNSSRCGIADFNNYVLQKIEPLENLLSKQNYKNWIQLKQLASQGRLLQTIAIRSTSIIPMQLHLKDLKLILANAEKRDIPGIKDIKEKILLLFQFKVPYYCGPLTDRSQYSNVVLKAGTREKITPWNFADQVDLEETKKKFMEGLTNKCTYLKDCNVLPRQSLMFQEYDAWNKLNNLSINGNKPSPEEMNALFDFASKRRKTTMSDIKKFEKRATMSKENDVTVSGWNENDFIDLSSFVSLSGFFDLGEIHSADYMACEEAILLKTIFTDAPQDADPIIAEKFPNLKPNQLAALKKMSCKGWATLSREFLTLKAVDADGEVMNETLLGLMKEGKGNLMQLLHSSLYNFQDVIDSHNRAVFGDKSPKQIANDLIEEMPPQMRRPVIQALRIVREVSKVAKKQPDVISIEVTRESNDKKKKEEWSKKATDRKKQIDLFLKNLKKTEDVKQTESELDGQAINDIDSIRGKHLYLYFLQNGKDAYTGLPIDINDVLNGTKYDTDHIIPQSLMKDDSIDNLVLVNREKNQHKSNEFPLPRDIQTKANIERWRALKKAGGMSEKKFNNLTRTTPLTEEELSAFVAAQINVVNRSNVVIRDALKILYPNAKLIFSKAQYPSQIRRDLEIPKLRDLNDTHHAVDAFLNIVSGVELTKQFGRMDVIKAAAKGDKDHSLNMTRYLERLLKKVDENKNETMTELGNHVFVTSQRHDFLLTYRFDYQDSAFYNATIYSPDKNLIPMHDGMDPERYGGYSSLNIEYNCIATIKGKKKTTRYLLGVPHLLALKFKNDGIDITSDLIKLVPHKGDEEVSIDWKNPIPLRITVKKDGVEYLLAPFNAQVMELKPVSPVFLPREAAEYLARLKKAVDQKKQFIYQNSAEIFQSKDKNNALQFGPEQSKNVALKIYALADAKKYDYCAMISKLRDAALRAEMLDSLSSEALFKQYNDLISLLSQLTRRSKKISSKYFSKSRGALLQDGLKIVSKSITGLYETERNL

SEQ ID NO: 664 - protein, 1471 aa, synthetic construct
  REGION 1..1471: note = MG44-279 effector
MPNKKYYLGLDIGTDSVGFCVTDENYNIIKKHKTVLDGDETKYYGNHLWGSRLFDKAQDAKSRRSTRERRRRLQRRKQRILYLQDIFSDERKKVDPYFFDRLNNSAIHLEDRDELLRQNHLLFNDKGYTDREFFEKYPTIFHLRKAMLNHPEIKFDIREVYLVLAHRIKYRGNFLHPGEMKAIGSDPETIVASFNELDNILKSLDEVGEASTTTTFCCDLAKARELIGVFQTVNKVGDLSDRITSAFQLNDKKSNSLIRQLIGLISGSKKKLNSLFPEINWDEEGEEIGKTDIDFGSDDFLDKALPSCSSIIGDERTELLLKSKDIYDLRIICSLLKGKAYLSDARVDRYNEHQEQLKVLKDLIKRYNPDFYSAFFRKFAINIKVEGKKDPIVYGTYAGYIGYNVVKKKIIRVKHSASQDDLYATVKFLLPLDKASADDFHEIEAGDKRKLLTIKNQIENKQYLLRQNSKENGVLPYQLNLNERRIILKNQSVYYPFLSEMDKDFGNPGKQCPKIESILKYKIPYYVGPLSTKAKNQWIVRKNGEKITPWNFHDVVDEKETANRFIENLKNYCTYLINEPTLPKQSLVFQRFTLLNERNKWKINGSYISVEDKEWIIKNVYLKQKKATKKSIESSLTRKYKGEKISLTSSGTKENGEKGVTNEDLHASLSSWIAFMDDRAFGYSLLTDTSKQELAEKIIYDITIFEDKELRLDRLKEYKLTPNQIRYRANLKFEGWAKLSGKLLTGLTTDLVNQDTGEISSYSILDLMWWTNDNFRQIRETKEGKNYKYSFTDQIEKLNDAGEETLDDIISNLYVSPIRKRALHQSIDVVLELKKVLKIDHFDSYFVESTRSDGEKKRTLSRQKKIISFYKEISKKLKSEIDIDRLTNEVKGKSDNELKGKKLYLYFRQGGKSVYTGEPIDINDFSAYDIDHIIPQAKVKDDSFINTVLVEKKVNNVKSDNYPIPKGILTEKGIHWVKFLHSANSDLMPEEKRNRILRPTTKPLSNDELSGFVQRQLVSTNQSVKAVCEVLKKIDKDAKVVYSKASNVSEFRQIFGLTKSREANDFHHAHDAYLNIVVGNVYNKVFSSGDSHIIKRKVDYLESRNRSTEYRFKNDERRLYTDTLVWKAKKYEGGWRGKEIPESEGDIDKIRKYLSYQDPLVTQRMYVNVGKQGLFNKISIHTAKDGNASFPLKATGPFAKEGYATKYGGYSDLSNPYSRLVRSEDKKGKHLYSIEFIPAIILNSFKGDEEKIKEYLEKEKNLKNPEIIIDKLLRKTIIQIPYTTEKGVRGNVRIAITGKSGNTLVCINRSELHRPMEYRKIVKKISKLLGLNNQAGNKVDTKVYTKYGTNDIDGKITREELYKLFQYRIEDVYCRPQFEGIPKVSATISKLKASTSAFVLLSTIDQATILSNRIKIISCKSASGTSFSPMLEKSNSVGDIQKIKYLSKGTKLIQTSVTGLYEKVLFTVPED

SEQ ID NO: 665 - protein, 1479 aa, synthetic construct
  REGION 1..1479: note = MG44-280 effector
MNNKNYKIGLDIGSNSVGWCVTDENYDIVEKKNKKLWGVLMFDEQQKNVDRRTNRGARRRIERKRNRIIYLQEIFKNEINKVDPTFFGRLDESFKQDEDRKYHDKYTLFIDKNFNDKTYFKKYPTIYHLQKYLMESNKKEDIRLIYLAIANCIKDRGNFLNSQEPEKFNVSFDKESAKANILDAINELSNYLTDDDNLLFDYSNENILADNFDKILKDNYEKTVNDKLNLYKDIFVEDIKNNKHFKKSLYEFVLKALSGKTISFKDYFINNLEDESTKLDYKISEEQEPQIIKIMSEFKDPDYLINAINKLSEIYQGLLLENIFKGSIKSLPEALVNRFNNYKQDLKELKRLVNALPNGYEMYKKIFIDSSEIVDNKCVIPNNYVHYTSSYREYNENGKISHKKTNTSKCSRDDFIDYLNKQFGFKDEKDRVKNPELYDLVHKPSFLLKPKTHENSVFPYQLKYQVIKTIIDNQKKFYDFFNEKDDDGYINEDKILSILTFRIPYYYGPLTINNKYVKGDEENVASKWAWLVKEEGKEQVKIRPWNYMDVVDDGTTQNNFIKKMQPRCTYLKNEFTLPKDSIIFQKYLVYQFLNYVRINGNFYFNADEKDKIIENLFLKNRKVSKKQFIQYINTNILKVNKDTESDIAFKNGALSEDIPSLSSLYDFKKVYGSLDEINKHEKEIEEIIKDIAILQDKDSLSTRLKNKYYLNDSQIKIIKGFNYKNFSSLSMRLLNEIEPCNKDGEIIHKTILTLLKECNSKDSQAQSLMGLLTMSPDSLANEYDFKTIIDKENGNNTSDDLNKFVDELYVPVCSKRAIKQSCKIIEEIQKILKLDNFDNVSFAVEVTRENQKDKKQKDSRYKEMKTILNKIKGFKDNYSEVSNNFNELEGKDEGKVRSEKYYYYFMQLGKDIYTGDSIDYDKLSDYDIDHIIPQSLIKNDSIDNKVLTKKTFNEGTKKNIYPFFNKIKLFKGNNNEAKKFWKTLLDNKLISSKKYNALTRTVELSDEELEDFENRQKTTTDQSVKGFMSVLKDRYKVPDKNIIYSKAGNVSYFRNKYEIYKSRNINNYHHAHDAYLNIVIGNIVANSYKNTYIRFKASHGESFQDYLIRNAYSINPEKIIDNYFDNKQKDLLVKIKENIFLTKNIFTKKRTTYVGSANVLSGVTLYPANGENSGIPIKNGLATSKYGHYDSYNFPSYCLLKSKIKEEEYCLEAVPAMYIGNNEKYFNKNPKYKDYEIYIEDLKVNTKMKIGDKSFIITGKTNDSYVILNSVEKAFVLEDINKTQNILKTIHNCEKLIRYFSNVIIKINDKSTKLLSSIDYINNDVDSLKVINDCFNGNYVLTNEYIKNPEYDKKDESKNNHELCLKNDELDELYDYILNLYERSCYKAYNSVYSIIKNLKLKKVFYNLNIVYKIRVISELLNAFKTNERKFVNLKFIECSKTQSGVLTQGKNIIIKNGESVKIIYESITGFYKKVINLK

SEQ ID NO: 666 - protein, 1479 aa, synthetic construct
  REGION 1..1479: note = MG44-281 effector
MNNKNYKIGLDIGSNSVGWCVTDENYDIVEKKNKKLWGVLMFDEQQKNVDRRKYRGARRRIERKRNRIIYLQEIFKNEINKVDPTFFGRLDESFKQDEDRKYHDKYTLFIDKNFNDKTYFKKYPTIYHLQKYLMESNKKEDIRLIYLAIANCIKDRGNFLNSQEPEKFNVSFDKESAKTNILDAINELTNYLNDDDNLKFDYSNENVLVDDFDKILKDNYEKTVTDKLNLYKDIFVDDIKNNKYFKKSLYEFVLKALSGKSISFKDYFVNNLEDESTKLDYKISEEQEPQITKIMSEFKDPDYLINAINKLSEIYQGLLLENIFKGSIKSLPEALVNRFNNYKQDLKDLKRLVSALPNGYELYKKIFIDSSEIIDNERAIPNNYVHYTSSYREYNENGKISHNKTNTSKCSRDDFIDYLNKQFGFRDEKDRAKNPELYDLVHKPSFLLKPKTHENSVFPYQLKYQVIKTIIDNQKKFYDFFNEKDDDGYINEDKILSILTFRIPYYYGPLTINNRYVKEDKENVASKWAWLVKEEGKEQVKIRPWNYMDVVDDGTTQNNFIQKMQSRCTYLKNEFTLPKDSIIFQKYLVYQFLNYVRINGNFYFNAEEKDKIIENLFLKNRKVSKKQFIQYINTNILKVNRDTESDIAFKNGALSEDIPSLSSLYDFKKVYDSLDEINKHEKEIEEIIKDIAILQDKDSLSTRLKNKYHLNDSQIKIIKGFNYKNFSSLSMRLLNEIEPCNKDGEIIHKTILTLLKECNSKDSQAQSLMGLLTMSPDSLAYEYDFKTIIDKENGNDTSDDLNEFVDELYVPVSSKRAIKQSCKIIEEIQKILKLDNFDNVSFAVEVTRENQKDKKQKDSRYKEMKTILNKIKVIKDSPEENVIGSFNELEGKDEGKVRSEKYYYYFMQLGKDIYTGEPIDYDKLSDYDIDHIVPQSLIKNDSIDNKVLTKKEFNEGTKKNIYPFFNEIKLFKGNNNDAKKFWKTLLDNKLISSKKYNALTRTVELSDEELEDFENRQKTTTDQSVKGFMSVLKDWYKVSDKNIIYSKAGNVSYFRNKYEIYKSRNINNYHHAHDAYLNIVIGNIVANSYKNTYIRFKASHGDSFQDYLIRNAYSINPERIIDNYFDNKQKDLLVKIKENIFLTKNIFTKKRTYVGSENVLSGVTLYPANGGNSGIPIKNDLDTSKYGHYDSYSFSTYCLLKSKIKEGEYCLEAVPRMYLKNVNDYFAKDPKFKDFEIYIDNLKVNTKMKIGNKSFIITGRSGNKYLTLNSIEKAFVLEDINKTQGLLNTIHNCEKLIRYFSNIIIKINDTSIKLLSSNDYIKNDNNSLKTINDSFKGNYFMTNEFIKNPEYDQKDKNKKNYALYLTCEELNVLYEYILSLYERPCYMNYSAVFSIINKLKKEDAFYNLNIVYKIKVINELLNVFKTNERTFINLEFINCSSKKSGVLYQGKNINVRNNESVKIIYESITGFYKKVIDLK

SEQ ID NO: 667 - protein, 1475 aa, synthetic construct
  REGION 1..1475: note = MG44-282 effector
MKKYYLGLDLGTNSIGWCVTDENYNIVKKHKLLLDANNKVLKQSGNHLWGARLFNEANSAAARRQNRGNRRRLQRRKYRIKLLQEIFNSEMDKVDPNFFRRLNNSFLHNEDKDEDLRTDYLLFNSNNLNDKIYFKQYPTIYHLRNDIIENPNKKFDIREIYLALAHMIKYRGNFLYESNISSSNGGSEEIITCFKNINNILLNLNENDDIEASYSTFDINSKIASAILNAFQSISKKDDLYDKLISTFSLTGLSKKESKNDLRKSILSIICGKKVRIIYFIKDNEIEDEDAKLPIDFSSDQFENEIKDKLPEILGDELANLILECQKIYNLKVLTNLLKGQSSISKAMISIYKKHQSDLKNLKYIIKKCYPSKYKIFFSNKPENETTYASYIHKIKALKNEDKSSSKDNANFLSTIKKLLNEVNTEDKNDKELIDNIIKDIDGENFLPRQNSSKNGVLPYQLNLNEMREILKNQSKFYPFLAEEATDFNNPNKQCYKIESILKYKIPYFVGPLKTTNNKKQRDNHWVIKNEKYLKTTVTPWNFHEVINEKETANRFIENLKNYCTYIFNEQTLPKNSLIYSSFVLLNEMNKWKINGEFISLDIKRYLITNVFLKIKKPTVKNIKEELRKKIKSDVDLSTSNKETLEDLDLHASLASFIDFKNAFGEKFFIKDNEGVVIGVDHNLFNLAEKIINDITVFEDKTVLKERLKEYQLSDENIKFFSNLKYTGWARLSKELLVGLKTEEIDISTGEVKEYSIMDLLKLTNQNFMEIYASRNSNYTFSKQVDEINKKNLGGDFNVEEFIQKSYTSPAVKRTLRQTYKCIVELKKILNIDSFDSYFIESTRQEDKIKKRTKSRMDTLKQYISAAKSLSNDIKIDELQENLKNQNDETLRSKKIFLYFMQLGRSIYSGESIDFSDLVSNNSKYDIDHIIPQSKTKDDSFINTVLVEKERNNKKQDMYPIPNTRKDIISDKGRNWIEILSKNKDLMPILKYKRLIRQKPLSDDELSGFIERQLVNTSQSNKAACDLIKEIDPDANVIYSRASLVSDFRHFFNIPKLRDLNDFHHAHDAYLNIVVGNVYNKVFTSPNGNWVKLNLQNKSSFNFQVEKVFTKDEYGLINHKQYWVSKIYENKIETNKKEGTIDKIRKYLNYNDVLTSKMLYKNVGAQGFFNKISIKTANENKATFPLKFNSKLSGENYSKKYGGYSDLTTPFFTLVKSKSKNKVLYSLESIPTIYRRLFDSISDEKLKEEKYLNFLKNECKLINPEILINKILYGTIIENGGNENESKRIAITGKTESNIAGINQNELYFSNTENKFIYLDTFKKICKLLGTNISNSANKPNLSIYEKETSDIKFSNQILTKLELSNLFTYIKTKIYSQPKFNLLFKNFFEKFNKVSVEKFSSLTTIGQVKLIFNMIKLLQCKSVQQTDFTYLDLSKNVGLLRCGKNFNYGTRLIQTSITGLYEKVIFEVPKNNIG

SEQ ID NO: 668 - protein, 1440 aa, synthetic construct
  REGION 1..1440: note = MG44-283 effector
MAKKYLLGLDLGTDSVGWCVTDENDKIVKRGGKSLWGARLFDEASPAADRRANRTARRRLARRKQRIELLQLLFKEEVDKADPTFFLRLNEAAYHKEDKNESISSFDHLLFVDKNYSDTDFYKDYPTIYHLRKSLMESNEKADIRLIYLAMAHMIKYRGNFLNEGQEIRPFDPDEGEALFKELNGELLEMGRPSLKLNDSFVESLKTKVVASRGINAKKDALVELFGCTDPYFKNVLFALISGGKISTKKIYENDIDDEIDPKDIQFSNANFEESYAKLTESFPNAPETEMVGTAKKIFDFLLLGKLLGDSKTISDAMVNRYTRHKDDLKALKKYIKDNLGKKIYNDVFRKCDVSDKKANNYVRYIGLANTKVKNQNVKIRCAHCSKDDFYSYLKAALNIDKAKKAEDIADPFLRDVYLKMDDGTYLERQNSSDNGVYPYQLNKQEMVTILEKQSKHYPFLNCVDKDGISTKEKIVKILEFKIPYYVGPLLSNNRKDQRGHFSWIVRNDDKEKIYPWNFDKLVDKDASAEEFIKRMLNKCTYLPEYNCLPKNSLLFQEYEVLSLLNKTLINGAFLTPETKKDLLENVFKTKAKVTSKTIVSYFKSKTGEDVTLQTSGGKELDDFNASLSSYCFFSKILGKEYVNSHAEQIEDIIRDLTIFEDSSIVVRRLDKVYHIADKQAVNAIKNKRLTGWGRLSRELLEMKTPFETSEGEYVEKSLISLMRETNLNLMELIHDKRFTFEKQIKEANSQLRDSFDSPDEKHQAIVDYVDSCYVSPGMKRPLIQAMAIIEDVEKILHAPIDEYYVECTRTNKAEKKKTNSRKEMLETYYKDAKKLAKADIEKEIVNKAYEELEKADLGKFRSDKYFLYFLQMGRDMYSLKPIDMSDIENYDIDHIIPQSLVKDDSISNRVLVHSSENRNKSATYPLTDSMFTCGRAEANRFYHFLKEAKLISEKKYASLTRITPLTEEELTSFVNRQLVYTNQAVKALISLIEHFQKNQKGETPKVVYSKAENVSDFRQKYEIVKSRDANDFHHAHDAYLNICVGRAVSTYFNRFVKIALYGKNGKEDNAKRFLANVNAQKASLNLDNVFKEYFDENGVCNRKQLMDSDGGIAWDYSSFVPMIKKNIYSRYDVMTTTMQYIKGGALTKATILPKGPGLVPLKMNGPLSKTEKYGGKTQTTYGFYTLVERELKGRTITTLVPMPNLYCNPSDQQSMTKYLEKKQIKIKKIVIPCLRANAVVKCGSSKAIISGVGNELQSYHIKNAAGLFYAESEISTLKKIRKLLDILAKSKTPATSDKAVDTIREFMVQTDDSLIISPSNGVSKEIVLTSRELDTLYKKYANINSNYLFLLKGAAGIINLLNDETAKGKFSVLPIHIKAYQIMQLANYFNSSIQSINMSLLGGVSSAGVLTISANLPSNCSIIVESPTGFFTKTLWKGC

SEQ ID NO: 669 - protein, 1388 aa, synthetic construct
  REGION 1..1388: note = MG44-284 effector
MEDGKKLFVGLDVGTDSVGWAATDQDFNLLRLKGKTAWGARLFSSATSAKDRRQFRTSGRRLARRKERVRLLNTLFDPLLSKKDPTFLLRLENSFLQNDDELKPVQARTDCPLFISKEEEKRFYKEYPTIWHLRKKLMENDDFAFSDIRFLYLAIHHIIKYRGNFLKTGEIKIGEFDKSCFDNFNAFCASFFESSLDDFDEDDSPSFIGLPKENYDKFIKTVERNEGKKAKAAELLNLLEPKNGVSKPFFTMFTTLCAGGTFSTKNLNKKDEDPVYEDTKIQFDSKYDEKEDEIRGVLGEAFDFVEYAKVIFDFADLHDILGNNNNLSSAFVSIYEAHKQELSVLKKACHYIDKAHSFGSKESLFKKIFRDQDNPANYAAFTHNKTTQKRCTIDDFNKFIVDTLNPYRDEVANSGCVNKGDWGCIFKLASENKLLQTISIRSTSVIPMQLHKKELEKILDNANKRNIFESKEISDKILALFEYKIPYYCGPLNTKSEYSNVVFKRQPNKNEELPWCYKEVIDFDATKKKFMDGLTNKCTYLKDCNVLPKESLLFQRFDALNKLNNLTINGERQPSLITELFTYAWSRSKTTLNDIKKYLKKKELCKENDIAVSGWNPNDFINCSSSATLGKVFDLKNFDRYTNGATWDKCEEIILIKAIFTDSPKDALEAIKKKYPDLSEAQLKAIDYLRCKGWSTLSKEFLTIKGKAVDKNGEVLERSENIIDLLAEGKGNMMQVLNDERYGIKNAVELHNDALFGKKTKKENVNELIESMPPQTRRPVIQAVRIVQEIVKVAKRKDGPDVISIEVTRENNDAKKKSEKAKEAISRKKQLEDFLKGLSGAKGSSIEKSRATEVLKELNQIENLDSLRGKHLFLYFLQNGKDAYSGKTIDINDVLTGTKYDTDHIIPQSMMKDDSIDNLVLVERTTNQHRQNEYPLPISIRNETNKAFWLRLKKAKMMSEKKYNNLIRGTKLTEEELSGFVAAQINIVNRSNVVIRDVLRILYPKTKLIFSKAQYPSQIRKELEIPKLRDLNDTHHAVDAYLNIVAGVKLTEKFGNMSVIKAAQEDATKHSLNMERFISNALYDDKEKKITALGSLIDRTSRRHDFLLTYRFDYSDSAFYKQTIYPADDIGDSLISVSDGIDTKRYGGYSNLATEFNCIATIKNSKKTTRYLLGAPHLLVKAGKEGKDIDAALAARVPHKEGDLVTVDWRHPVPLATTVEKNGIEYLLKSKNAECISVFPITPVFISRENEVYLKTFISFSEKRTDVVAVEKKWMVNQSRLGTNDFELTPEKSIKVFRELILLAQNPRFDFYSLITDLRLEKTRERLEKTILEGTLSDQIKCLIETLSRFTRTTDLGPVRKSRGSILQCDLKIVSKSITGLYETERKL

SEQ ID NO: 670 - protein, 1369 aa, synthetic construct
  REGION 1..1369: note = MG44-285 effector
MANKLFIGLDVGSDSVGWAATDENFHLYRLKGKTAWGARIFSEASDAKGRRGFRVAGRRLARRKERIRLLNTLFDPLLKEKDPTFLLRLENSAIQNDDPNKPAQAVTDCLLFANKQEEKGFYKRYPTIWHLRKALMDNEDCAFSDIRFLYLAIHHIIKYRGNFLRDGEIKIGQFDYSVFDKLNETLSVLFDLQSEDEDSQEGHFVGLPKSQYEAFITTANDRNLPKQTKKTKLLSMFEKDEESKSFLEMFCTLCAGGEFSTKKLNKKGEETFDDTKISFNASYDQNEPNYQEILGDAFDLVDIAKAVFDYCDLSDILNGNDNLSNAFVELYDSHKSQLSALKAICKQIDNQSNLKGDASVYVKLFNDPNDKSNYPAFTHNKTLVDKRCDIHTFDKYVIDTVLPYEPLLMGQDATNWQMLKSLAEQDRLLQTIALRSTSVIPMQLHQKELKIILKNAISRNVKGIAEIEEKILKLFQYKIPYYCGPLTTKSAYSNVVFKNNEYRPLKPWDYEEAIDWDETKKKFMEGLTNKCTYLKDKNVLPKQSILYQDFDAWNKLNNLKVNGSKPSLKELKDLFSFVSQRPKTTMKDIQRHFKSDTNSKDKDVVVSGWNPEDYICCSSRASFGKNGVFDLNNPDSSDPKDLSKCERMIFLKTIYADSPKDADVAILKEFPDLTNDQKSLLKTIKCKEWSPLSKEFLELRYADKYGEIRESIINLLRSGEGNLMQILAKYDYQERIDAYNADSFQTKSKSQIVSDLIEEMPPKMRRPVIQAVRIVHEVVKVAKKEPDQISIEVTRENNNKEKKQQLTKKAKSRSAQIQTFLKNLVKIDTFEEKRVDEVLEELKKYSDRSINGKHLYLYFLQNGKDAYTGKPINIDDVLSGNKYDTDHVIPQSKMKDDSIDNLVLVERSINQHRSNEYPLPESIRKNPANVAFWSKLKKAGMMSEKKFNNLTRANPLTEEELSAFVAAQINVVNRSNIVIRDVLKVLYPNAKLIFSKAQYPSQIRKELNIPKLRDLNDTHHAVDAYLNIVSGVSLTERYGNLSFIKAAQKNENQTDYSLNMERYISSLIQTKEGEKTSLGKLIDQTSRRHDFLLTYRFSYQDSAFYNQTIYKKNAGLIPVHEKLPPERYGGYNSMSTEVNCVVTIKGKKERRYLVGVPHLLLEKGNKVADINKEIANSVPHKENETIAVSLKDIIQLDSMVKKDGLVYLCTTQNKDLVKLKPFGPIFLSRESEVYLSNLNKFVEKYPNIADGNENYSLKTNRYGEKSIDFLQEKTGNVLKELVDLSNQKRFDYCPMICKLRTIDYRKGVEGKTLTEQLILIRSFVGVFTRKSEALSNGSNFRKARGLVLQDGLVLCSDSITGLYHTERKL

SEQ ID NO: 671 - protein, 545 aa, synthetic construct
  REGION 1..545: note = MG44-286 effector
IIPQSLVKDDSISNRVLVHSSENRNKSATYPLTDSMFTCGRAEANRFYHFLKEAKLISEKKYASLTRITPLTEEELTSFVNRQLVYTNQAVKALISLIEHFQKNQKGETPKVVYSKAENVSDFRQKYEIVKSRDANDFHHAHDAYLNICVGRAVSTYFNRFVKIALYGKNGKEDNAKRFLANVNAQKASLNLDNVFKEYFDENGVCNRKQLMDSDGGIAWDYSSFVPMIKKNIYSRYDVMTTTMQYIKGGALTKATILPKGPGLVPLKMNGPLSKTEKYGGKTQTTYGFYTLVERELKGRTITTLVPMPNLYCNPSDQQSMTKYLEKKQIKIKKIVIPCLRANAVVKCGSSKAIISGVGNELQSYHIKNAAGLFYAESEISTLKKIRKLLDILAKSKTPATSDKAVDTIREFMVQTDDSLIISPSNGVSKEIVLTSRELDTLYKKYANINSNYLFLLKGAAGIINLLNDETAKGKFSVLPIHIKAYQIMQLANYFNSSIQSINMSLLGGVSSAGVLTISANLPSNCSIIVESPTGFFTKTLWKGC

SEQ ID NO: 672 - protein, 1360 aa, synthetic construct
  REGION 1..1360: note = MG44-287 effector
MADKLFIGLDVGSESVGWAATDENFHLYRLKGKTAWGARIFSEANDAKTRRGFRVAGRRLARRKERIRLLNTLFDPLLKKDPAFLLRLENSAIQNDDPNKPIQAIADCPLLVNKQEEKDYYKRYPTIWHLRKALMENDDHAFSDIRFLYLAIHHIIKYRGNFLREGDIKIGQFDYSIFDKLNETLAVLFDLQNEDGENEEGRFIGLPKSQYEAFITCANDRNLPKQPKKAKLLSMFEKTEESKAFLEMFCTLCSGGEFSTKKLNAKGEETYQDAKISFNSSYDENEGAYQEILGDFFDLVDIAKAVFDYCDLSDILNGNDNLSSAFVELYDSHKSQLSALKSICKRIDNQNGFIGEKSIYVKLFNDPNDKSNYPAFTNNKTLVDKRCDIHTFDKYVKETILPYESSLTGRDAVNWQMLKSLAEQDRLLQTIALRSTSVIPMQLHQKELKIILKNAVSRNIKGVAEIEEKILKLFQYKIPYYCGPLTTKSDYSNVVFKNNEYRPLKPWDYEEAIDWDGTKQKFMEGLTNKCTYLKDKNVLPKQSVLYQDFDTWNKLNNLKVNGNKPSLEDLNDLFSFVSQRSKTTMRDIQRYLKSKTNSKENDVVVSGWNSEDYICCSSRASFNKNGIFNLNNSEVLKECERIIFLKTIYTDSPKDADAAVLKEFPDLTNNQKTLLKTIKCKEWSPLSKEFLELRYSDKYGEIRQSIIDLLRNGEGNLMQILAKYDYQEVIDACNAASFQTKSKSQIVSDLIEEMPPKMRRPVIQAVRIVQEVAKVAKKEPDEISIEVTRENNDKEKKQQLTKKAKSRSTQIQNFLKNLVKIDASEKKQANEVLEELKKYSDQSINGKHLYLYFLQNGKDAYTGKPINIDDVLSGNKYDTDHIIPQSKMKDDSIDNLVLVEREINQHRSNEYPLPESIRKNPANVAFWRKLKKAGMMSEKKFNNLTRSNPLTEEELGAFVAAQINVVNRSNVVIRDVLKILYPNAKLIFSKAQYPSQIRKELNIPKLRDLNDTHHAVDAYLNIVSGVTLTDRYGNMRFIKASQDEEKHSLNMERYISSLIQTKEGQRTELGELIDQTSRRHDFLLTYRFSYQDSAFYKQTIYKKNAGLIPAHDNLPPERYGGYDSMSTEVNCVATIIGKKTTRYLVGVPHLLIKKAKDGIDVNDELIKLVPHKENEVVKVDLNTTLQLDCTVKKDGFMYLCTSNNIALVKLKPFSPIFLSRESEIYLSNLMKYVEKYPNISDENSEYEFKINRENVDPIKFTEKQSIEVVQDLIIKAKQDRFSYCSMISKLRDINAEEMIHSKSLTEQLKIIKSLIGVFTRKSEILSDKNNFRKSRGAILQEDLFLCSDSITGLYHTERKL

SEQ ID NO: 673 - protein, 1467 aa, synthetic construct
  REGION 1..1467: note = MG44-288 effector
MAGKKFYLGLDIGTDSVGFCVTDENYDIIKKHKTVYDGEKTKYYGNHVWGSRLFDEAQDASSRRRARERRRRLQRRRQRIVLLQQLFAPEMEKVDPYFFDRLNNSAIHLEDRNELLRQKHLLFNGNDYTDKDFFKKYPTIYHLRKARMEHPEKKFDIREIYLALAHRIKYRGNFLHEGERTSIGSDPETIVSSFNAIDSTLEDIREEEENFTVSSYGCSLDRAKELLEKFKTINKIGELYDVLVSVFKLNGLKSTDPKRQRLALIAGSSKSLSQLFPEIEFEEERGKQKVDFSSEDFADKVIPGCSSAIGDSRVRLLLKLKELYDLRILARLLNGKATVSEARVDIYEKHKEQLKVLKDLVKRYCPDKYNAFFRQFSESEKGDKKGFFSYASYIGFNDKNGKKEMVAHSVITDDLYTTIKARLPLEEADKDTFAEKQPGDKEKLLSIKKAIENRDYLLRQNSKENGVLPYQLNLNERRIILENQSKFYPFLGEKDKDFNNPEKLSYRIESILKYKIPYFVGPLSRKATNSWIVRKEGHNEKITPWNFHDVVDEEATADGFRANLKNYCTYLINEPTLPKQSLVYQRFILLNERNKWLINGSPITVEDKLYLIKEAYLTRKSVSKKYVTDILKRKYKTSVDLTTKGSGSGQGVTDEDFHASLSSWIALRDSRAFGPALLHDKKKQALAEQIIYDIATFENQNLRVKRLKKYPLTPNQIKYISGLSFEGWAKLSNKLLTGLTTERTNPETGEVLEYSIMDLRWRTNRNFREILTTKEGKDYKFDFRPKIEELNGSKNENREDFLNSLYASPMRKRALKQTIDIVQELKKILKIDQFDSYFVESTRFEGEKKRTKSRKDKILALYKESVKQFRAEFDLEKLKNVLEKRTDGELNSKKLYLYFRQAGKSLYTGEPIDLNELSTAYDIDHIIPQAKVKDDSFRNTVLVEKSVNNKKQDRYPIPADIRTPKGISVIKALHSLNNDLRPKDKRNRLLRPVSKPLTDDELSGFVQRQLVSTNQSVKAVCEVLKWRDKDAKVVYSKAKNVSEFRQVFDLVKSREANDFHHAHDAYLNIVVGNVYDKVFSTGDSKTVKHKREYLEARNRDTEYRFKHDERRRYTDTLVWKAKRYEPNWHGEEVKDSEGTIDKVRKYLSYQDPLVTQRRFTNVEKHGFFKISLHTAKEGNATLPIKQKGPFAKEGWQKKYGGYSNRSNPYASLVRSEGKKGKHIYSIEFVPTVIRLQRKGNPQARKKYLTENNKLKNPEVLIEKLLRRTILQIPYKAENGKEGYVRLGISGKTGSSIVCINRSELHIPAVYRKTIKKISKRLGLNNQAGEKTDTSIYEKFGSNDIDLGKGRQITRDELKKLYDYRVKDVYCRPEYEGLPTLSATITKIKGATAFESLSTLNQRNVLAILVKLVSCKSVQGNDLTILNLEKATNCGKIVASRLLISKTKIIQTSTTGLVERVLFTVPED

SEQ ID NO: 674 - protein, 1469 aa, synthetic construct
  REGION 1..1469: note = MG44-289 effector
MEPKKYYLGLDVGTDSVGFCVTDQDYHIIKKHRVVRDGENTKYYGNHIWGARLFDEASTAKGRRSSREGRRRYQRRRWRITLLQDIFKDEMAKVDPYFFDRLNNSAIHNEDREEQLRSEHLLFNGASKSDNQFFKDYPTIYHLRQAIIDHPEMKFDIREIYLCLAHMIKYRGNFLHEGEMSSIGNDPKTIMDEFNQLDEILEEINLQEESMDSISFRCTPEIADDLNTKFKTITKIGEISDAMVAAFKLTGSKSTSLPRQMLDLIAGKKKKLSGLFPEIELDEETGKTAIEFDSDDFLDKVIPICPDSIGEERTKLLLKLKEIYDIRILSSLLRGESSVSDAMVQIYENHKRQLKELKDLVRRYNPKEYSNFFRKQTVGKGKNAKPIPNYVNYIGFNDVKGRKVGVKHSTTQDDLYAQIKKILPVEEATKETFIEKEPGDKERLLNIKNSIEGKTYLLRQNSKENGVLPYQLNLNEMRQILDNQKKYYPFLGEMDKDYNNPDKQCYKIESILKFKIPYFVGPLSAKAKIQWIAKNSDERITPWNFHDVVNEDKTAEKFMENLKNYCTYLIKEPTLPKQSLIYQMYVLLNEMNKWKINGQYITKEDKKYLIQEVYFKKKKPTLKSVQEALKCKYKTGVTLTSSGTTVDGERGVTADDFHATLSSWISMMDDRAFGNELCLDCKKQALAEQIIYDIATFENKDLMLKRLKKYNLTDSQIRYIANLKFDGWARLSNKLLSGLKIDIVNTDTGEILPTSIMDLMWETNQNFMEILTSKKDDGNYRYGFMPQIEKLNEEIGGTIDDVLESLYVSPMMKRALLQTMKIVEELKNFLHIDHFDSYFVESTRTEGEKKRTQSRKKKLLEYYAAVKKNYKEERIARLEEDLKNREEGELQGKKLFLYFMQLGKSVYTGKEIPIDELSTNYDIDHIIPQSKVKDDSFLNTVLVEKQVNNNKSDLYPIPNSILTKEGRDWINILSSKSGGNLMPTAKRDRLLRSVTRPLTDNELSGFVQRQLVSTSQSVKAICEVLKKIDPKAKIVYSKAGNVSDFRKIFDLVKSREANDFHHAHDAYLNIVVGNVFNKLFSSGNPKNIQHKLSYLEGMNMKPEYIFKHDARMMYTDALVWKAKRYLDKEGKIEDPDSKGTIDLVRKYLSYQDPLVTKMMVTNVGKQGFFNKISLHTAKEGNASYPLKMTGPFSKPGFEKKYGGYSDLTNPYVSLVRSDGKKGKNIYSLEFIPTIARMTIGEDEAKLEKYLSDNNGLKNPKILIEKLLMKTIVQIPYTTENGKNGYVRLGISGKTNDSIVCFNMSELHISEQYMKTIKKISKLFGLNNQAGNKVDTSFYEQFEKGDIVKGKIELTRTELHDLFMYLIDDVFCRPEYEGLPVLSTTFQKLKMHIVDFETLTTFNQMVQLINLIKLISCKSVRGVDLTNINNCFPKNCGIIMISKNLTLNTKIIQTSVTGLYEKVLFTVPED

SEQ ID NO: 675 - protein, 1484 aa, synthetic construct
  REGION 1..1484: note = MG44-290 effector
MAKKYLLGLDLGTNSVGWCVTDENDKIIRKNGKSLWGSRLFDDASDASARRMSRSARRRLGRRKQRMNLLRAFFKPEIDKVDPTFFFRLDESYLLKEDKHPSIAKFPCLLFNEPGFTDKEFFAKFPTIYHLRNELVSSSEKADIRLIYLAFAHMVKYRGNFLNQGQNIGAFDVEEARDIVNELDQELFDKGLCHLCPREGWAEQLKQLIPTSHGVSGKKEVLLELFPTEDSYLKTVVFPLASGSEISVKKIFPDIEDDSDLNPKKICCGSETFDEDLAKLSEQFSGNAIEIRIIGTTKKLYDYLLLGKLLGNSKTISEAMVARYNEHKKQLRAFKKYIKEKGKQTGKDLYKRMFGPITTTVIVKEDGKEKEKIVKLNNYSAYVGAYFDEKTIINCAHCKQSDFYKFVSDELGISNQNKDGESATKNTDSYCDEIKKLMADHSFLPRQNSSENGVFPYQLNLQEMRAIVSRQSHFYSFLNGNDKDTEGYSTVEKIESLLTFRIPYYVGPVVFKKEGDEKHPFAWTFADPGKGPIKPWNFDSKINKEESAEKFIQRMLNHCTYFPNEPCLAKGSLLFQEYELLSFLNKIRINGEFLSPEKKAQLIDEVFKKRAKVSIKDLKAFYKPNDVDITMGENGKEIANIPSLSSYVFFSKDTVLGKEFVDSEEGREIVEGIIQDLTVFEDKEIIETRLKRLYALHKLPRRADGKERQVINAIANQRMSGWGRLSKKLLLLKTTLINEFGEVIYKTLIQMMRETNKNLMELIEDDSLDFKNQIEEEQVSSAKDFLNPNEKHQAILEFVEDSYVSSAMKRPLIQAMDIIQDVEKILGRPIDEYYIECTRTNKAEKKKKDSRKEQLDKLYKAAKAATRNDIKEALEHSKNQLKGKEGEKLRSDKYFLYFCQLGHDIYTGEEIDLNNLDQYDIDHIVPQALVKDDSVSNRVLTLSSHNREKGANYPIPDSVFNSCGVTNGRTKMKEFYKYLKNNGLMSEKKFAALTRETPLTKDELKGFVDRQLVFTNQAVKALVDLIYRFQKKQNGGTPMVVYSKAENVSDFRHEYNILKSRDVNDCHHAHDAYLNVCVGRAINTYYRRYIWADLNNKEANEITDSISRQKGSLNLENVFKEYRDKNGAACRKPLLDKDGGVAWDYSTSVQTIKKNIYKRADVRITRMQCLKGNFFEKTQIKPKGQGNIPTKEVLREVVDGKETVRESPLTNCDRYGGIPSLSYGFYALIEQVSKKGKKDVTSSIVVPVPNLYCRPGDKEGLERYLVDNCGLNVKRIIIPCLRPNFVVAKGQAKVVVSGVNAAMKSYYIKPDFPITYSESEISTVRKIRKLVDVVSKNSEKDKEEQFIEQNFILEEGGLVLSPAGSPSAKEVVLTNGELETLYSKFGRIPSYLLTLLPGFSAVIDFLNEEKTKQAFATLSIYKKSLLLIGVVGYFNASSARVDLSLLGGKKNVGGLSISSALPKGARILAESPTGYYTKVLWKSE

SEQ ID NO: 676 - protein, 1388 aa, synthetic construct
  REGION 1..1388: note = MG44-291 effector
MEDGKKLFVGLDVGTDSVGWAATDQDFNLLRLKGKTAWGARLFSSATSAKDRRQFRTSGRRLARRKERVRLLNTLFDPLLSKKDPTFLLRLENSFLQNDDDLKPIDARADCPLFISKEEEKRFYKEYPTIWHLRKKLMENDDFAFSDIRFLYLAIHHIIKYRGNFLKTGEIKIGEFDKSCFDNFNAFCASFFESSLDDFDEDDSPSFIGLPKENYDKFIKTVERNEGKKAKAAELLNLLEPKNGVSKPFFTMFTTLCAGGTFSTKNLNKKDEDPVYEDTKIQFDSKYDEKEDEIRGVLGEAFDFVEYAKVIFDFADLHDILGNNNNLSSAFVSIYEAHKQELSVLKKACHYIDKAHSFGSKESLFKKIFRDQDNPANYAAFTHNKTTQKRCTIDDFNKFIVDTLNPYRDEVANSGCVNKGDWGCIFKLASENKLLQTISIRSTSVIPMQLHKKELEKILDNANKRNIFESKEISDKILALFEYKIPYYCGPLNTKSEYSNVVFKRQPNKNEELPWCYKEVIDFDATKKKFMDGLTNKCTYLKDCNVLPKESLLFQRFDALNKLNNLTINGERQPSLITELFTYAWSRSKTTLNDIKKYLKKKELCKENDIAVSGWNPNDFINCSSSATLGKVFDLKNFDRYTNGATWDKCEEIILIKAIFTDSPKDALEAIKKKYPDLSEAQLKAIDYLRCKGWSTLSKEFLTIKGKAVDKNGEVLERSENIIDLLAEGKGNMMQVLNDERYGIKNAVELHNDALFGKKTKKENVNELIESMPPQTRRPVIQAVRIVQEIVKVAKRKDGPDVISIEVTRENNDAKKKSEKAKEAISRKKQLEDFLKGLSGAKGSSIEKSRATEVLKELNQIENLDSLRGKHLFLYFLQNGKDAYSGKTIDINDVLTGTKYDTDHIIPQSMMKDDSIDNLVLVERTTNQHRQNEYPLPISIRNETNKAFWLRLKKAKMMSEKKYNNLIRGTKLTEEELSGFVAAQINIVNRSNVVIRDVLRILYPKTKLIFSKAQYPSQIRKELEIPKLRDLNDTHHAVDAYLNIVAGVKLTEKFGNMSVIKAAQEDATKHSLNMERFISNALYDDKEKKITALGSLIDRTSRRHDFLLTYRFDYSDSAFYKQTIYPADDIGDSLISVSDGIDTKRYGGYSNLATEFNCIATIKNSKKTTRYLLGAPHLLVKAGKEGKDIDAALAARVPHKEGDLVTVDWRHPVPLATTVEKNGIEYLLKSKNAECISVFPITPVFISRENEVYLKTFISFSEKRTDVVAVEKKWMVNQSRLGTNDFELTPEKSIKVFRELILLAQNPRFDFYSLITDLRLEKTRERLEKTILEGTLSDQIKCLIETLSRFTRTTDLGPVRKSRGSILQCDLKIVSKSITGLYETERKL

SEQ ID NO: 677 - protein, 1411 aa, synthetic construct
  REGION 1..1411: note = MG44-292 effector
MAKYRIGLDVGTNSIGWAVTDLNNKLIMKKGKKLLGVLMFEESSGGDKDPNKLRRTYRCSRRRIRRRKERLNYLNEIFAPEINKIDPTFFERLDESFLKLEDRKYKDKYTLFIDKNFNDKTYFKKFNTIYHLQKYLMESEKKEDIRLIYLAIRHLIKYRGNFLNSSNPDNYSSKIDELDFLERLTRVFEIINSYEIYSKFNKPILDINDIKSLIKANKDSKGINSKKENFIKIFNKEEKKNNLIDFVASLLAGSSVELNKILKKGEDGPQNSIKISFTDDLTEKFLELRSEYPEYDDFISSIEDLYRLYQALYINKYVQNSLPQTMVERFNTYKTDLKLLKGYIRKYYSTKYDEVFNSIENKMSYPHLVRHYCSDIDKKTKVNISNDKSFSRIEFINYLKNEFSFDQDDELTLKLKERINSDDFLLTQSDKGNGNFPYQLNYFVLKKIIINQEKFYSFFDEKDSNGYVNKDKIISLLTFKIPYYIGPLSNNYDESDENNHAWIIRKKEGHIRPWNFDEIVNVEDSAKKFIQRMQNKCTYLINEYCLPKDSITFQKYLVYQQLNTLYVNGKFYFNSDNKDDLIINLYSKNRKITKKLLQDYLSNKLKEKVVITYKNGKDKDVEPNLHSLSSLFDFIKVFGSYEEVDKNIDLIENIIRDIAIFEDKSILASRLENEYKLNKDQIRIIKSFNYNKFSRLSKKLLDGIKPVDKNGVLINKTILTILKDYDGSENKPATLMEILNSKDSEYDFDSVIKIENSKEEENESVDSFIENSYLPKISKRPTILTCRIIEELAHALKANISEDFEFYIECARTNKSDKKATKTRYEKLMETLSKSGLKSQVDSLINELKKYENDKSKLNAESLYLYFMQLGKDMYTGDQIDLNTIIENYDVDHIIPRSLIKNDSLDNKVLTEKKFNNGKSNIYPLSKIDLWEYNGGRKKALEFYKKLKDNNLISERKYIALTANTDLDNDTLEGFANKQLSTTNQSVIGLKEVFEDYYSINSENIILSKAENVSDFRNNFDLVKSRTANNFHHAHDAYLNIFVGSAVNSWIKNIFKLWRIDESNEHKYSDFVSFVREKRYTLNPIKIMEKYVKDQSDEFNELKDVIYNYKFIFTKTRTYIKKDFFPKSTVYAANSCANINTKNNLDCKKYGGFKEYAFGYYVLIKTKDNKFILEPVPYVFNKNVSKYLDNLYKKNYEIYLDNVKINTKFQIEKRQFIITGKTGSSYVVKNSIERYFPYYLIKIIKKVDNFMIFLKLNKIGINVEKQESINKAIDNLNDLHKIKDINNELISKENKIGEIETLTTNELINVFDYLFELYNKDVFSFSFSKTLIDEQVELKNKFIHLNILLQTYTISEMLDYLKTNERKDINLISLGGKGQCGIIKINKVLPIGAKIIFESNTGLYKKEISLK

SEQ ID NO: 678 - protein, 1468 aa, synthetic construct
  REGION 1..1468: note = MG44-293 effector
MAGKKFYLGLDIGTNSVGFCVTDENYDIIKKHKTVYDGEKTKYYGNHVWGSRLFDEAQDASSRRRAREKRRRLQRRRQRIVLLQQLFAPEMEKVDPYFFDRLNNSAIHLEDRNELLRQKHLLFNGNDYTDKDFFKKYPTIYHLRKARMDHPETKFDIREIYLALAHRIKYRGNFLHEGERTSIGSDPETIVSSFNAIDSTLEDIREEEENFTVSSYGCSLDRAKELLEKFKTINKIGERYDVLVSVFKLNGLKSTDPKRQRLALIAGSSKSLSQLFPEIEFEEERGKQKIDFSSEDFADKVIPDCSSTIGDSRVRLLLKLKELYDLHILARLLNGKATVSEARVDIYEKHKEQLKVLKDLVKRYRPDKYNAFFRQFSEAEKGDKRGFFSYASYIGFNDKNGKKETVAHSVVTDDLYTTIKARLPLEEADKDTFVEKQPGDKEKLLSIRKARENRDYLLRQNSKENGVLPYQLNLNERRVILENQSKFYPFLGEKDKDFNNPEKLSYKIESILKYKIPYFVGPLSRKATNSWIVRKEGHNEKITPWNFHDVVDEEATADEFRTNLKNYCTYLINEPTLPKQSLVYQRFILLNERNKWLINGSPITVEDKLYLIKEAYLTRKSVSKKYVTDILKRKYKTSVDLTTKGSESGQGVTDEDFHASLSSWIALRDSRAFGTALLHDKKKQALAEQIIYDIATFENQNLRVKRLKKYPLTPNQIKYISGLSFEGWAKLSNKLLTGLTTERTNPETGEVLDYSIMDLRWHTNRNFREILTTKEGKDYKFDFRPKIEELNGSKNENRKDFLNSLYVSPMRKRALKQTIDIVQELKKILKIDHFDSYFVESTRFEGEKKRTKSRKDKILALYKESVKQFRAEFDLEKLKNVLEKRTDGELNSKKLYLYFRQAGKSLYTGEPIDLNELSTAYDIDHIIPQAKVKDDSFRNTVLVEKSVNNKKQDRYPIPADIRTPKGISVIKALHSLNNDLRPKDKRDRLLRSVSKPLTDDELSGFVQRQLVSTNQSVKAVCKVLKWRDKDAKVVYSKAKNVSEFRQVFDLVKSREANDFHHAHDAYLNIVVGNVYDKVFSTGDSKAVKHKREYLEARNRDTEYRFKHDERRRYTDTLVWKAKRYEPNWHGEEVKDSEGTIDKVRKYLSYQDPLVTQMRFTNVGEHGFFKISLHTAKEGNAAFPIKQKGPFAKEGWQKKYGGYSGRSNPYASLVRSEGKKGKHIYSIEFVPTVIRLQRKGNPQARKKYLTENNKLKNPEVLIEKLLRRTILQIPYKAENGKEGYVRLGISGKTGIYIICINRSELHIPAVYRKTIKKISKRLGLNNQAGKKTDTSIYEKFGSNDIDLGKGRQITRDELKKLYDYRVKDVYCRPEYEGLPRLGTTIKSIKNYSSFDGLSTLSQRQYLAIIVKFSSCKSVKGTDLGAVIGNGYSKSCGDVIVKTKLIPQTKIIQTSTTGLVERVLFTVPED

SEQ ID NO: 679 - protein, 1560 aa, synthetic construct
  REGION 1..1560: note = MG44-294 effector
MDEVKRYYMGIDLGTDSCGWCVTDQNFRIIKKSGKHLWGIRLFDDAKTAKERRSFRTQRKRLQRRRYRIACLREIMGPAIEAVDKDFFQRLDNSNLFDWKDESKKIPLKKDSLFNDPQFHDKEFFRAFPTAYHLRSYLLTTSKRVDIRWIYLALAHIIKYRGNFLNPNEDSNGNMDLHDIKNSFQSINAIAQTIYDQCDDPDLKEKGSSFIGFGFKSTGSSFDPDSLNSFEITDEEAIKVKEIFKNCTGVTETFEKLANLFDEAVKNKFLSTILKLICGGKVNSKDLFLTDDYVDDQNFKSIKLDDWDEKLEPNLSSINDIFASLLQECKALYDAHNLTNLLGDYHFISQAMAGRWDEQKDEFEGGRYNEHRSQLRDLKHIVKTYYPDKYSVIFRDLLDKGQKDDGKENYPSLIGSSMVNRRKIKSKHAKIDDFYSFLKKTINLDDLYKRLKDSSLPAEKDDLKIVEKINEDIKNRKFLLRQNSGENGYITHQLHRAELLKIIDKFKADYPCLGEKDDRGNYKILDILMFKIPYYIGPLDNNSKNVNSWARRVPVNHPQGKIKPWNWDEFVDKPKAAEEFVERMVNKCSYLLSEKTLPANSLIYTKYKVLNEINKIAVSIDGSVSRFFSQDEKDSLFKLYEEKGKPTLSDIKNWAKLYFSSDKVELSTSQSSDRVNKLDKNYLQSNLNSYRDFKNILGDINHTNFNIIESIIRDITIFEDKSILDERLRNINISGHKLNDEQISKIKNLNYKGWGALSAELLDGIKGMDHAPQSEEEIESADGPTILEAMEKVSEDENGNYHSDNFMEVLNNSKYHFSDIINFINEEKGAETYKGFVKYIEDSFGSPMMKRATIQAMKVIREAEHIIGHPIDRFFIESTKSPDKNQKGKNGNDKLRSRELSKRYEQIMKSISASDQDKINKDANEKLKGLIGKNDNSKFRIKRVYLYFLQMGKDVYTGEDLSFDDVLKGTDKYDIDHIIPRSMIKDDSLDNTVLTSKAVNNQMKGDRYPIPRGVITSKGREAIEFLHRNGLISSVKYKRLLRTKDFTAEELAGFINRQLTSTSQSVKALGQVLKIDTDIRREKAKKSGQGFEEYRNPNWKQVIVYPRASNTHDFRVLFDFPKCREVNDFHHAHDAYLNIVVGEVYRSKYGDIATAKKIKELRERKINEDGSETGPTNVFGKIWDENIKRTGSGDTSRFDWIPDTKDKSKKDATIRIIKKEISRKDILFTRMPIEKNGGLWDINIISPKGKDNLVSHMSIKNSPKDSRLYKLHDVEKYGYYNNPSALYFSVIRAKVDKNKDFSYYLVPVPSYILSKNALDDNLVSYYKVNGFDQPEIIIKKVLLNTICSYDDDKSQPVYRFMIASKTGKSIKVYNAWQAYYPDKFMCYGKLISSFVDKYIKNKDLVSDKEEEYKVFKGNSKDWYDIPIPDKISKENNLELYDFLAKQFSKNIYKHWSIFSKLGESLPRIRDGFISSSLVDQTLFLECLINSLHPGEFNFKSAPEGLLKLNNCKKQSGLLRINQSLGPGFKLYAQSPTGFYENVIFAIDKNGNEVSTKKNGV

SEQ ID NO: 680 - protein, 1312 aa, synthetic construct
  REGION 1..1312: note = MG44-295 effector
MKKQEKKYYVGIDLGTSSCGWAVTDENYNLLRLKGKDAFGARLFKQADSAKGRRGKRTSRRRMARRKYRIQLLNEILGPALEKKDPEFLIRLSYSRLNHEDKKTASKKNLNSFPIFPSRKDEVKFYKCYPTIWHLRSALSKNDSKAFSDLRQVYLAIHHIIKYRGNFLWDGKRSGVLDDSQLNAILDDLNDTILNLPKDDERSSDALLSEENYGELFRILENHEGKVHQQKRIKALVDCQDLNQKEYWSLFAKCVTGGKFSPIIQDDDDKSSFDFNHFDDDTMAECQDKMGDVFPVVESAKKIYDFFILKKLLGPSKSVSGAMVAAYNQHHSDLMAAKHALHAIDRKLGTYNASDSKYFQFFKDKKRNSNYAAYVGVDSFFGREKNKTNENLIKEFKALITGNEDAISPEELKLLQRHLSDDEKSFMPLIAHLSTSVIPHQLHENELQAILDNASLYYPDIFTLENKSKIMAIFKYRIPFYFGPLFGPRSNIVRKDLNSTTRISPFNIDDIVDKAKTREKFRNSLTNFCSFLHSETVMPKASLDYEEYIILDRLNRIEVNDKELSGKEKENVLEYILSRGKTTKGNLIYFFEQQGWKKQDIRISKMDENLPFSATTHSYLRKQKFDLMRDHDKLEDIIVIATIYAENKKDLKEVLQNRYPEYSEKQINILCGRKTCKWGRLSKRLLTELHPVDKDGVVQDCRNVLEIRRTTNQDLEQILNNPEYNFHSIIDRENEQESKQNQIGEILDNVPAPFRRSCYQCLRILGEIKRVTGNDPEKIFFEVTREDLKSIDKKRTKSRSDLIKGLYNQLKDLKQALPQVKFENLNMQLKGRDIVNDMSLRGKHLYLYFRQLGLDAYTGEPIDIDDVLKGTIYDTDHIIPQSLKKDDSLDNLVLVNREYNTKVKSDIYPIPLKIKTEKVVRLWHYLHDNKLMSDKKYDNLRRNSILSENEIKSFVSQQINAVNYSNRALKELVHALYPNTQVIFSKAQYPSERRKTYHRPKLRDLNNAHHARDAYLNIVCGDILSVEYTEKNISAFYDLKKEEIAKKEQNPSIIRDKKNDEKSFNMVNCLNRHRRANKGELMKKCQNVFHKHSALITFGLTYADPAFYNAKASSIASKNGKVESLVPIHTSLKNPLFAALSDVTKYGGYDNSGTAYRYLISYCVSDGKKTTHFLRFLNVKNYILKICKSEDALRKKLYDLNKKDLGKVDFGKVHFLAKVINGQKIKYLGSIFLLSSSNALQVDCTNAQQIYIDDRFTDERMPLLYTEYLKFAFNNLKRFEKAQDSSLLVTTDKEKSVGITLSKERNIAILKK

SEQ ID NO: 681 - protein, 1411 aa, synthetic construct
  REGION 1..1411: note = MG44-296 effector
MAKYRIGLDVGTNSIGWAVTDLNNKLIMKKGKKLLGVLMFEESSGGDKDPNKLRRTYRCSRRRIRRRKERLNYLNEIFAPEINKIDPTFFERLDESFLKLEDRKYKDKYTLFIDKNFNDKTYFKKFNTIYHLQKYLMESEKKEDIRLIYLAIRHLIKYRGNFLNSSNPDNYSSKIDELDFLERLTRVFEIINSYEVYSKFNKPILDINDIKSLIKANKDSKGINSKKENFIKIFNKEEKKNSLIDYVASLLAGSSVELNKILKKGEDGPQNSIKISFTDDLTEKFLELRSEYPEYDDFISSIEDLYRLYQALYINKYVQNSLPQTMVERFNTYKTDLKLLKGYIRKYYSTKYDEVFNSIENKMSYPHLVRHYCSDIDKKTKVNISNDKSFSRIEFINYLKNEFSFDQDDELTLKLKERINSDDFLLTQSDKSNGNFPYQLNYFVLKKIIINQEKFYSFFDEKDSEGYVNKDKILSLLTFKIPYYIGPLSNNYDESNENNHAWIIRKKEGHIRPWNFDEIVNVEDSAKKFIQRMQNKCTYLINEYCLPKDSITFQKYLVYQQLNTLYVNGKFYFNSDNKDDLIINLYSKNRKITKKLLQDYLSNKLKEKVVITYKNGKDKDVEPNLHSLSSLFDFIKVFGSYEEVDKNIDLIENIIRDIAIFEDKSILASRLENEYKLNKDQIRIIKSFNYNKFSRLSKKLLDGIKPFDKNGVLINKTILTILKDYDGSENKPATLMEILNSKDSEYDFDSVIKIENSKEEENESVDSFIENSYLPKISKRPTILTCRIIEELAHALKANISEDFEFYIECARTNKSDKKATKTRYEKLMETLSKSGLKSQVDSLINELKKYENDKSKLNAESLYLYFMQLGKDMYTGDQIDLNTIIENYDVDHIIPRSLIKNDSLDNKVLTEKKFNNGKSNIYPLSKIDLWEYNGGRKKALEFYKKLKDNNLISERKYIALTANTDLDNDTLEGFANKQLSTTNQSVIGLKEVFEDYYSINSENIILSKAENVSDFRNNFDLIKSRTANNFHHAHDAYLNIFVGSAVNSWIKNIFKLWRIDESNEHKYSDFVSFVREKRYTLNPIKIMEKYVKDQSDEFNELKDVIYNYKFIFTKTRTYIKKDFFPKSTVYAANSCANINTKNNLDCKKYGGFKEYAFGYYVLIKTKDNKFILEPVPYIFSKNANQYLDNLYKKNYEIYLDNVKINTKFQIGNKQFTITGKTGKRYLLKNAIERFFSYDLIKIIKKVDNFMNFLKLNKIGINVKNQESINKAIDDLNNLHRIKDKNNELISKENKFGEIETLTSNELINVFDYLFTLYSKDAFSYSFSKALIYEQEELKNKFMNLDILLKTYTINEMLNYLKTNERKNINLIRLDKEENCGQLNQNKVLPLGTKIIFESNTGLYKKEIILK

SEQ ID NO: 682 - protein, 1509 aa, synthetic construct
  REGION 1..1509: note = MG44-297 effector
MSNNKKYYLGLDIGTSSVGFAVTDENYHLVRKQGKHLWGSRLFDEAKDASPRRLARSSRRRLTRRRERINILQSLFENEIKKNDEYFFERLNHSSWQKEDYDYEKIGGDLLKGYLSNSAYYKKYPTIYHLRDRLLTDKSQADIREVYLAIAHIIKYRGNFLRDGDIKNASKSIESIKQCFEKINDCLKEIECFQNLSFDVGDKQCEELLKVFKEPLSKGELLDKEKAILNLNDKLLENFLALVNGGTKKYKPLFPELVEEMPDLKDKDGICFEIDNFEESVLASELPDEYKNLLLSLKSLFDIRVLVNILKESETLSSAMTMIYENHKTQLRDLKELYKYFCSNETYLTMFKNAPKKLTKTEKDENKAIGCTYSEYIGRFFDENRKRKDLNRSTSANLYKRIKADLPLEKYCNPENNVLSPDENINKDILNKLKKTYNSIENGEFLKIQNSKMNGVIPYQLNKNELIQILENQGKYYPFLLEKGTSFVSPSKQEYKIVSLLEYKILYYVGPLKTGVSKNAWSIRKEDGKILPWNFYDKIDAHATAEQFIRRMKNKCQYLKGEETLSKFSLINLQFQIFNELNNIQICIDGNPLPSEKQWEAFDKVKLFNSVYKNNRKITAKKIEEYLKKESNSSIKSIKIKPKSSDDAEKVSDILKTSYTPYIDFVNNNILPENFDEDVELFEKAEKTIELITLFEDKSILKEKLAELGFNEEQLKILCSLNYKGWSRFSRKFLTNKSNEECGDNKIDILSKETTKGSDKTKDQGETIFNLVKYTSQNFMSVFYNADYGFVDAVNEYNKNNVDNENINDLIEDSYLSPMMKRSVRQTFKIIDELERILKINEFDRIFVECTREHQDSKRKNSRNEQLTAMFNAAKALVKDENEHLKASEKEIGELKATLTKYETEGKLKAKKYFLYLAQLGHDVYSGEQINIEELNNYDVDHIIPQSMLKDDSFTNTVLVKKQTNNSAKSDTYPFAQDSSILTENGRNWIRYLNKLSIKSKTGYMTNEKMSRILRTKELSNDELEGFVNRQITTTNQSVKAVIDILKATSKKTEIIYSKAGLVSDFRNLFDLVKVRFINNLHHAYDAYLNIVVGNVYYEKFNNLKTREYIISERNKNPNFKCFTDVKSVFCFNRYVESRSHNYDGTIVWHRTLIDGMSENEFHKKFKEMKPENIGGTIELIRKTLSWHDPMVTHMLRTQTGKQGFFNKIAIKRPKHNRVEGDNNSPLFPLKNVYPFNKNDWDKVYGGYSDLTTPYFYLVESDSKEGKNYTIESISSITASSNPSKEQIENEIARNNNFKLKNPCLVFGKDNKLLINSLIQLPPKDGEKSAFLAISGRTGNSVLTYNSSELYISNESIEYLKMISNVFKLNLPAGKKVDLSDIKDDDNDILIGDKEISKTKNNELFNELIKRISQKVFSEIPESYFEKLSSIQTREKFETLTTKKQCEILINLIKFFGCTSSGKYSFRILGDDYTNNAGSHRLNKKLPVGTKIIEQSYTGFYERVLFEVK

SEQ ID NO: 683 - protein, 1406 aa, synthetic construct
  REGION 1..1406: note = MG44-298 effector
MLICTRYVKYNYILKQKNNIVKGAFTMNAKELRLGLDLGTDSVGWALLDENNHLIKKNGFTFWGVRMFEEAKDASERRGYRNSRRRLNRRRQRIELLQQIFAKEINQVDSTFFQRLNDSFYKIEDKKNGNYYNLFNGEYTDQQFFKRFPTIFHLRKYLIHSIEKADIRFIYLALHNIIKYRGNFLIPGDEFRTSDYTQIKNAFIELNEIISELNTAFEDDESYKEEYFDLIEEAKLNDEFFNQLQEILVQQKSLKERKDSLKSLFNVSNKSIIAEAIIPLLAGSSKINAAGLSLIKSCKYDKLEIELSKESLEDDLDEGKSKIPELSSLFDYFLKVKEIIDFYYVIKILKKPDITYSEAMVQMYEEHEKDLVRLKKFFKKYLKNEYHNCFRKVDKKINNYPHYVGFNSVNGTINRYSHCTRTDFYSYLKKLLEKVTTEEAQTEKDYFLVKMENNEFLLRQNSEQNGSFPMQLHLAELKMILNHQKQYYPFLLEQSDGITNYDKIIAIFKYKLPYFVGPLNQNSEYSWIQRTNEKITPWNYKNVINMDETAIQFIERMQNKCSYLKGPEDYCLPKKSIIFSEYNCLSYLNKLNIDGSLIPTDVKMGIMKEVFMVKKSPTKKDIINYLRSNFGVNSITTTNEKSIPEINCDMASYIKFKEIFGEQIIKNLDLIENIIRDITIFEDKGILETRLNNVYHLDKLKIKKIKDLNYKGYGRLSRRLLNELPVVHKNTGEIAGTVLDVMRNTNLNLQEILYSEDYRFIDTIDEYNLKYQTNENVKIADFIDENISVSPSFKRPIIQAFGIIEDIEKAFGRKIDKYYVECTRTNKAKKGATSSRYSKLKDIYKNCDKLAQEYNINIKELKDKLDANQDKLKSDLLYLYFTQLGRCMYTLEPIDFDDLSKNYKFDIDHIYPQSVVKDDSLSNRVLTNKNKNAEKSDHMLSELPGFLSKDAYAFYEKLMDLDLISKEKYKRLTKKSFTEDELNGFVNRQLVTTNQAVKGLIETLKLYKKVDQSNIIYSKAENISDFRHTYDLVKSRLANNYHHAHDAYLNVIVGDTLNEYYKSKRYYYMKDYERIKNEGYSLNPIRIMTKDSISINNQEIWNKNVMIKQIKYDLYERFDVYETIRSYNLNDMFSKVTILPATPNSKSVPVQTTTPRANVGKYGGITSNSYSKFVIIKNVNKKGVEEYILKPIPGTYKNRIEEYLKKEGYINFEVINNDIKINVVVVDGTLKYCITGVSGDSYVLKNMKDRNFNYQNIMIIKKIEKYLENKKLNNVMIFDEKRIIIAPAKNYQCKEISLTYDEVVSLIVSISKLYHKDIYGYSSITANMELLEIDKLVDFSVIELIDFASELLKLLKTNERKTADLTKIGGASSAGTLSLNKTLKKGMKFISESPTGYYKKVLFEVK

SEQ ID NO: 684 - protein, 1349 aa, synthetic construct
  REGION 1..1349: note = MG44-299 effector
MKKFYLGLDIGTSSVGIACTDENYNLLRAKRKDLWAVRLFDEANVADERRIQRTNRRRLQRRAARIDFLQSLFAPYMEDNLFFLRLNNSPYVFDDKAVELKSKFSLFNDDGFSDKDFHKLFPTIYHLRKALIEGKEKYDLRFYYLAIHHIVKYRGHFLFESENIGDGSDFEVLLKDFNAISESLFDENVFVFDIAKGNDFLNLAKDKSGLNDKFKKVFELFSLTLQRHKEIVKLILGGTAKPSVIFGDQFKDEKAFSFAKITDEELQNKADVFGEGFDLIDKCKAIFDYIRFEKIRNGYKYISDAMVGIYETHAKDLRVLKRLLKPDSELYRAVFKDAYSKAGSKEDKGNYNYANYIGYTKPQKRKITVKKCKEEDFFKWLKKCLINSSIPKDSLDYIYVVRRLDEGTFLPKILHADNGVFPHQINVVELDVILSNMVRDYPELGILDDEGLSCAEKIKKIFLFKIPYYVGPLNTKSENGNSWMVRKKDGKITPWNFDEMVDLPASNEKFMRRMTNKCTYLHGQDVLPKCSIIYQKFDVLNQLNKLQINGEPLDISQKQNIFNDLFLKYRKVTDRQIKNYFEKQGNLGLECIISGKDGDFKCSMSTYISLEKILGDKVRLMPDMCEEIVLWHTLNTDKRIVDELVHSKYGKVLSAEEMKALKGLSFKDFGRLSKKFLCGIYGGMDDCTGEMYTILGELWNTNKNLNEILFDQKYSFSDEIQRENGSEFDDITYKSVEDLYVSPKIRRGVWQALLMTDEYVNAVGRAPDKIFIEVTRTNNAEKGDKGRKASRRNQLLDLLNANKSIDAFNDLVEELNHKTDSDLRSERLYLYFKQFGRCAYSGQIINLEQLGSDMYDIDHIVPRSLVKDDSLDNKVLVLRTKNLKKSDTYPLPEFCLQKAMWDLWRKSGCISEKKYAALTRTNELTDNDYEGFINRQIVETSQMVKAVAELLKKKFHAGNTRIVYSKAENVSDFRQRLKGKIVKCRSTNDLHHARDAYLNIVVGNVYETQAKFYRKGNQWRTYNLKKLFTQNIDGAWNMPQSLNTVLGTVSKSSMQVTRYTYVNKGAFYDQTVYPKGENGVTAPRKGKGPLADTSKYGGYKSLTTAYFAIVQSLGKKGKIVKTIEAVPVLVDYQTKGDVCALTEYFAKQGLVEPKILVRKLKMKTLVRVNGFYCRLAGITGKQILLHNSIEWFTDAQTDRYVNNLEKLVEMDKSKRIPDVDRNNEEFAMHTNRLGDVSLSINKAANLALYDAIIEQLSKDIYQGISGAVYFTKMLENNYKNFENLTTLEQSMILLECIRFLKCNAETADLSKLGEGTSCGKLLINKNISEISFEIVHQSPCGLTEKIVKV

SEQ ID NO: 685 - protein, 1440 aa, synthetic construct
  REGION 1..1440: note = MG44-300 effector
MEEKKFYLGLDIGTDSVGWAVTDDTYHLIKKQGKHLWGSRLFEEASDASARRSHRAARRRYQRRRGRLLILRSLFKGEMDKVDPEFFERLDKSSLHKEDKKPGIHLPYIISNTKQFSTYKTIFHLRQAMLREDRKFDIREVYLVIAHMVKYRGNFLHEGAISDNGVSDDDVKSYFDEIDSLIEPCFSEEDEEAPRFDLTLEQAKALIELFKLDMNLGVRFDKETNILGEKPTGVKMAVVKFINGSKMKLQDFFVELKEDPEKGKKAVSADLDDFESAIADFDLTDDQVALLLKLKEAADSFTLVNLLKGKPSITEAMVDIYNDYHIDLQSLKTAVAELERLGIEPVGYKKKFFNDPCGDKGKAASNYAGFCGKTAAHGRLTKCKQEEFLKIVKDIVDKLNEREDLSEQAKKAVARISKRMEIGKFMLRQNSKANGVLPYQLNENELRAIIERQGKYYPFLLDRDKGFPNPNKQEYKIISLLRYRIPYYVGPLSNPVDGKHLKNHWVVKKDYDVKIYPWNFFDVVDRAKTAKAFMDNLRNSCSYIKGEETLPKNSLIFQEYKVLNELNNHLYGGCPIDEDMKKYLFENLYLKKKTIKKKDLKEALRLYTGKSAAFTTRRSEEEKEDEKDDKMSSLSSFIDFEKILGQGFYKDKALFEKAEKVIATITAFEDKATRTEQLSELLDEGQAAAAAALKYKDYATLSRRLLDGIKSQCEILDTGEIIPLTILDLLKRTSLNFMEIYEDDGRFSFKKQVNEINAAYAGEIGNEADMRKTLIDESYANPALKRALFQTLHIIDELKHILRIDHFDRIFVECTRAPGEKKKTTSRKDAIKKQLASVSKDLAKQINEVKEQLEGKTDDQLRGKHLYLYFMQMGRDVYTGEPINLERLSKDYDIDHIIPQAYVKDDSFMNTVLTSRAKNNTKSKEYPIPQGFITKEGRQWIEVLVANKMMPKEKADRILRVNPLSDNELSGFVNRQLVTTSQSVKAVIEILKLTESTKPENIIYSKASLVSDFRGFFYLPKVRDLNDFHHANDAYLNIVVGDIYNQKFSNRLTARIIAELKERNKDFSLKSGPESVFTHRVWARGYSKKMVWMPCEYKAKHFDFDNEIPTENATINLVRKTLSWNDPMVTWMTFRQTGKQGFFNKISYVPKKEATDKNYPLKKVPEGMTATEFMQKYGAYSDMTTAYFCLVKSKKGYSLEGVLSLVDSSLSKDPDEKKKQLEKYFVEKGIEKPEIVLDYVPLRTILVVPSETGTAKIAISGRTGNSIIGINASEASISKEWIPYLKSVSKITGSALPAGKKKDLSEYEKNEPFREEIIEGQAKVTRNQNLEFFKYIANSLYQKEPYRSLPGIGKTLSKLDTFETGFANMTTIQQLKFIITMVELVSCKSVQKRKLSVLDPSLPANFGTITIIKTLKPGTLILKVSPTGFYKTEIVTIPEN

SEQ ID NO: 686 - protein, 999 aa, synthetic construct
  REGION 1..999: note = MG44-301 effector
MSEGTYLLRQNGPDNGVFPYQVNLMMLKGILDNQSKYYQFLSTSDEDGSVKNKIISLMKFKIPYYVGPLYNGNDENRKKFAWVVRKEEKIYPWNFDRVVDKYASAEAFIKKMRNKCTYLSNEEYCLPKESLLYSEYNVLSELNKLCVNGVPLELAAKNYLIEELYEKRRNVTKKMVIDCLKTFYNSKNIEISTSNSKEMEEIHASLKSRYDFINIFGKDYFGKHIDEIEDIIYNITMFEDKDILKSRLQQKYSFETSILNKILKLNYKGWGRISRKLLAGLPAADKNGETIISIMRNSNQNLMEILYDSKYNYQQIIEDYNNKFIQKETYDIESMKKYIDKLYTSPMMKRSLIQTCKIILELEKIIHHPINEFYIECTRKHEEKKIKGNRKDSRYEAVKKLLDDAFKDKKIQSDNGDLDSARKLLKEKCENDPSMLRSDYIYLYFTQLGRCVYTGQKINFDDLINGNLGKYDIDHIYPQSLVKDDSLDNRVLVVSEANRLKSDKYPIKYAELKPIDGYNAFAYAKFLLDHKLISQEKYHRLTRRTTLTDDDLKSFINRQLVSTSQSVKAVADLLRHYKKDALVVYSKANAVSDFRQTFDIIKCREANDYHHAHDAYLNIVVGRVLHEYFRFDSPTNQILRLHEKGFTSNPKKVFIDNENKNKLPLKSRNGEVIWDYQKTIDKVKKQIFNHFDIFVTIRAYIKTSLFSQESIKPAREVQEGALPLKKNGLLNDIKKYGGYSNLSFGSYMLVESDSKKGKKYSIETIPTIYTHYSDKEKLAYLVEKKKLENPKIVLPIFKVNTVIKSGHSKYCITKKTGDRFGIQNLIEANFDKEELKLIRLSFKALEKLRKIGLVSDYKILEDTDLNEYGNEFLISAPRTNKNSPIIVTLDEMKKLFNVLSNKLGSNIYEAFSPIKTICEILHKKEYIEMINNFNLIQYIVLNQSILNLIKCDKTLSDLSIIGLSSQSGGITLSKNLNIKMKILTESVTGYYTKVLWSNE

SEQ ID NO: 687 - protein, 1449 aa, synthetic construct
  REGION 1..1449: note = MG44-302 effector
MEGKKYYLGLDIGTDSVGFAVTDEDYNLIRKQGKHLWGVRLFDEAKDASGRRAQRASRRRLQRRRARIKMLREIMGEEINKIDPLFFKRLDESSLHKEDKSDGVYLPYGFTDDKSLFNKYPTIYHLRKAMLESEGKFDVRLVYLVLAHMIKYRGNFLRQGQIQQGGASPKEVEVLFDQINDSIKTLSGSPEDDDYEEPDLFKVSDEQAKKLINSFKTDIKKSERTDREAEIFGEKPKGVKYAVLSFINGGEVQLVKFFPRLKEDDPDLAKAKIKTDIEDFDNKILEFNLMEEENELLKTCKSLADVLLLVNLLKGENSITNAMVQVYDDYHKDMVNLRGYVNGLVGLGILNKDDKEKFWHGTSGVTYATYSGKKGNGKHEKPIEKCKQEDFEKAVENWLKLCPEGNKELADYKKAISSRIEIGKFLQRQNNPNNGVFPYQLNENELTVILEKQGKHYPCLLSMDKGFPNPNKKEYKIVSLLRYRIPYFVGPVSKYDDSMPNHWIVKKDENTKIYPWNFYDVVDKAASAKAFMDNLRNTCTYIKGEETMPKNSLVFQEYKVLNELNNLYANNAPLTQAMKDYLFENLYLKKKTIKPKDIKDSLKAFTGNAKLKVTPRANEEEEKIDYILKSSLSSWVDCSKIFGEGFYKDKEKFEKAEKMIAIITAFEDKDTREEQLKELLTEEELKQVSKLNPGYKDYSPISRRLLTEIKTERLNKDTGEILSYCILDLLKSTNSNFMEIYEGGEYDFKKKVDAINLEKYGTTNNDTIKELIDDAYVSPGLKRSLFQTRHIIDELKRILHIENKGFDKIFVECTRAKEKPKATKSRKKKLEEYFKAATKEVQKEFEIAKLQSELASKTDDQLRSKHLFLYFMQLGHDVYTGEEIDLNRLSQDYDIDHIIPQAYVKDDSFTNTVLTSRGKNNTKQKDYPLKEGFITLEGREWIKTLNRITFDKTKMMPNEKMDRLLRPEAKQLNDEEIMGFVNRQLVNTNQAVKATCDILKLLEKNTEIIYSKANLVSDFRGIFELPKVRDLNDLHHANDAYLNIVVGDVYNQKFNNRITRAWIADIKANGGSYKAGPQWIFKSNVRSRDGKRTIWVPCQYQRTVEGDIELPTENATINKVRKTLSWNDPMITYKPQILVGDGGLFGKTSYLKGRETKPENFPLKKIPLGKDPKTWLSKYGSYKSVTTPFYTLVKSKNGKKGWKYSLEGVPAPILANFDIGKVEEGMIGYFKSKGLIEPTIIIDKLPINTILKIPSKEVDCKKEVSLRITGRSGNSIICVNASQPMMDAEHKRYFKCVCNILGTNAPAGKKKDSSIYEKTDPYRESIVEGRQTVSRKGNAELFDYISNNLYSNPIFKGLPATGGTLEKIKLSKPEFEGLTTIGQCKVLALLIKLISAKSVQQIDLSILKNGIPKNVGGIPKNKILEPGTEIIQKSITGFYTKTLFVVPED

SEQ ID NO: 688 - protein, 1441 aa, synthetic construct
  REGION 1..1441: note = MG44-303 effector
MKENKEYFLGLDIGSSSCGWAVTDSEYNILKAKGKKLWGVRLFEEASTAEERRIFRSNRRRLDRRKLKLMWLQEIFANEIGKIDKNFFARMKYSSLFTDDKIKMNEHLKSKYSLFDDNNQNGKYTDSEYYKDYKTIYHLRKELLTTPAKDIRLLYLALHNIIKRRGHFLIEGELNENNGSFIDELNKFVRCYNSLIEQYEFDNNDYNKLKELEENSNLLKEINKLGKKDLKNKLNSLLVVKEDKLSKLMIEPIVSGKLNLESLIKILNIEFDENDLKIDFSSEDYENKFLPIIDKLPEDWPNLIEELKKCYNSLKLTSILNGKNYICEAMVDIYNKHNLQLNGTSEDGKKVKKGFKDFIKEFYPSKYNEIFRDNLTNDKTFNYCSYINSDLVNGKKQLLQKVNEKGKTKDSVRSSRDEFYKYIKSILNLTPENIVESKGNEYERLKQEFINLMDEQEFLPRLRRKENGLFPNQLYQNEVKKILEINSSKYTFLNDKDESGISNKDKILQILTFRIPYFVGPIGENQKTDNHWAVKRNCNLAFKPWNLDKIIDLDKSEDEFIQRMINKCTYLPEEPVLPKNSLLFSRYCVLNELNKLTINGKYISVPLKQKIFNELFKKYAKISPKKLQDFLVSEGYFPNKDSAIIGGIDKEFKSSYKSYIVFCDILGQDFVERNEKMIDEIIKLHTIVSDKKRLIERIKIEFPNVFTDEQLKKIKALNFSGWGSLSYKFLQNYIFVNKKTQQNTDVMTELWQTNNNLQQILSSDYTLSEKLENYYNKHKDDIIYQDVENIYCSPAVKRGIWQTILVIKDVIKTMEQKPSKIFVEVTRHDDEKGEKGRKLSRYKSLKKIYESKEFKDSFKNTKDDLEQLLRELNKQDDLTMRSDRLFLYFMQEGKCAYSGKPIDIEDLISGSGKYDIDHIIPQSFGKDDSINNKVLVCSELNREKSNIYPIFKDDKFNYILNNETMSMWKKWKEHGLMSQIKYDRLVRKDELSDEERKGFIERQLVETNQSVKAVIDLLKQIMDNPRDIIYSKARLVSDFRHKYDILKCRDVNDLHHAKDAYLNIVVGNCVRARFTDNIRNFIKSNNNKEEKEKNTYNVMKIFEHSIYDFKNSNCVWNNTNILEKVKKNCLRNDCLISKMSYKKLNTNFYDQTIYKNKEHQVSFGDIIPLKGENNPLSNIERYGGYNSYSYGYYMVIEDEQEKKKQIIREKYLLPVPVLYIKKFNNDKDKILNELTKDYKLKNPKILKDSVNIQSTIKIGKGEYWIGGVTNSSYVLHNANEWFVDKETSDYIRIVKKYEDMIKQKIEIKDDCKFEDKIILSKPTKDGNKEISLLKDKNVKLYDNILKQLEKEIYKDMQLQENLYKDLKENFNKFLTLSVSDQAKVLSGIINRMATGAALADISLLNGKKGLGMLKIAQKIINIDIRLIIKSPSGIYDRVEKL

SEQ ID NO: 689 - protein, 993 aa, synthetic construct
  REGION 1..993: note = MG44-304 effector
KEKCKRCVDADEFYKYVKGVITAHRSELDEKLADEVLADIEDGNFMPRPLNADNGVFPYQVNESELAEILKNAERDFPEFLEKSEGYTLSEKIMSVLKFRIPYYVGPLNTYHEQKVDGKGGNSWMVRKEEGRIMPWNFDEKVDRAKSNDKFMRRMTNKCAYLHGKDVLPKCSILYQKFDTLNQINKLTVNGLPVSVEIKQRVYNDLFLREKRVTFKRIKNYLAEIGYIAESEKNDTVVSCGKNEDLKASMSTYVTLRNKLGDLVDTNEDMCEDIVLWHTLNTDKNIVGQLISDKYGDIPEVQNNIKFLKGLNFKDFGKLSKELLCETIGGVDENTGEAYTIIGELYKTNMNFNELLWSDGYEFRKSIDEENGAVGSEVGYEDVESLYVSPAVRRGIWQALVMCDEYTTALGRKPDKVFVEVTRGKGEKGPTESRKKKLEKLYEGCTGIDDLKQQLGGMTDFRLRQERLYLYFRQLGRCMYSGDKIELDALMSDSYDVDHIIPRSVSKDDSLDNKVLVSAVLNRYKKKNTYPVPDSCRPPKAVELWNLLKAKDLISGEKFDRLMRTNPLTQEELEAFENRQIVFTGQAAKAVAELLKRKYETEDGGSVVYYSKASAVSDFRRKFRFDKCRDTNDLHHARDAYLNIVVGNVYNVRFSSLYLDKKRGKPISVSAEDDLYDKPIYGAWQCGKTLSTVYKTMNKFSMCVTEYSYKGKGAFYNQTVYPATDGSIGAPRKGKGPLVDTQKYGGYKTLNTAYFSVVSHLGKKGERIKTIEAVPVLAAYGIGEDADKLRDYFVSKGLSDPVLLVPVVKKYSLMKYNGTPVFITGVTGNRLILRHAVQWFTDGRTDAYVKALQKFKEGADAGQLSGDEEELEVNKSRVRRGIKINPENNLALYDKIIAQLGLSVYGGLSGAANFLKNIREKRDVFMSVSLKDQVKTLLEMVKFLGGSKGLSDMTEIGLSKESGRLLIGQDITNANVEFIHRSPCGLHTVTRRV

SEQ ID NO: 690 - protein, 1134 aa, synthetic construct
  REGION 1..1134: note = MG44-305 effector
KKCYNSLKLTSILNGKNYICEAMVDIYNKHNLQLNGTSEDGKKVKKGFKDFIKEFYPSKYNEIFRDNLTNDKTFNYCSYINSDLVNGKKQLLQKVNEKGKTKDSVRSSRDEFYKYIKSILNLTPENIVESKGNEYERLKQEFINLMDEQEFLPRLRRKENGLFPNQLYQNEVKKILEINSSKYTFLNDKDESGISNKDKILQILTFRIPYFVGPIGENQKTDNHWAVKRNCNLAFKPWNLDKIIDLDKSEDEFIQRMINKCTYLPEEPVLPKNSLLFSRYCVLNELNKLTINGKYISVPLKQKIFNELFKKYAKISPKKLQDFLVSEGYFPNKDSAIIGGIDKEFKSSYKSYIVFCDILGQDFVERNEKMIDEIIKLHTIVSDKKRLIERIKIEFPNVFTDEQLKKIKALNFSGWGSLSYKFLQNYIFVNKKTQQNTDVMTELWQTNNNLQQILSSDYTLSEKLENYYNKHKDDIIYQDVENIYCSPAVKRGIWQTILVIKDVIKTMEQKPSKIFVEVTRHDDEKGEKGRKLSRYKSLKKIYESKEFKDSFKNTKDDLEQLLRELNKQDDLTMRSDRLFLYFMQEGKCAYSGKPIDIEDLISGSGKYDIDHIIPQSFGKDDSINNKVLVCSELNREKSNIYPIFKDDKFNYILNNETMSMWKKWKEHGLMSQIKYDRLVRKDELSDEERKGFIERQLVETNQSVKAVIDLLKQIMDNPRDIIYSKARLVSDFRHKYDILKCRDVNDLHHAKDAYLNIVVGNCVRARFTDNIRNFIKSNNNKEEKEKNTYNVMKIFEHSIYDFKNSNCVWNNTNILEKVKKNCLRNDCLISKMSYKKLNTNFYDQTIYKNKEHQVSFGDIIPLKGENNPLSNIERYGGYNSYSYGYYMVIEDEQEKKKQIIREKYLLPVPVLYIKKFNNDKDKILNELTKDYKLKNPKILKDSVNIQSTIKIGKGEYWIGGVTNSSYVLHNANEWFVDKETSDYIRIVKKYEDMIKQKIEIKDDCKFEDKIILSKPTKDGNKEISLLKDKNVKLYDNILKQLEKEIYKDMQLQENLYKDLKENFNKFLTLSVSDQAKVLSGIINRMATGAALADISLLNGKKGLGMLKIAQKIINIDIRLIIKSPSGIYDRVEKL

SEQ ID NO: 691 - protein, 1381 aa, synthetic construct
  REGION 1..1381: note = MG44-306 effector
MEKKYYIGLDLGTSSVGWAATDENYNFLRLKGKTAWGARIFSEAVDCKGRRSFRSSKRRVARRKYRLLLLKNLFAEEMAKVDKTFFLRLENSTYWAEDKAKDAEGNDLGKTLIFKTTEEEREYHKAYPTTWHLRKKLVDNDEQALSDLRLVYLAIHHIMKYRGNFLSDGTKDNEEPSKDTIDRINVILNLLEAKDNESGISDNITYLSKESYNELIETLEDKNLNKTKKQDKIKKLFKNVDKTNEDIKVYIDLFKTLVTGGVFSVKKINEEYDKLKIDFNNGFDDNADEISKALGDAYELVLIAKAYNDYISLKDLLGGKPYLSYVMADIYDEHKKDLKSLKKILVSIDYKHGNEGNNRVYNLVFKPVIVPKEERKDKDGKKNKKLTTPNYASFIQGDDVEKKSVTLENLNKNIKEILKANKQYVDEKDKEEFDRLLDKASNNELFKKQATVSTSLIPHQCHLEELNKILENAGKKYPFIKENSDKIIQLFKFRVPYYYGPLNNESKEHAWIVKNEGKERTKITPWNIDEVVNKEKTREGFFKKLTNSCTYLVGETVLPKVSLVYEKYLALERLNKMQVNGNYLNHSDKMDLLNYVLGNSNTTIENIRKKLASDTGMKINDIVISNIKNNVPFTATSHAFFRKHFNLENSGEFELCEEVIKYATIYADDKKELKKFLSEHRDYFGFDEKLIKEIANLQTNKWGRLSKKFLCGGAKDEMYYTDENGVMYTILGLLEETNQNLQEIVNSGKYGFDEKIKEFNDALTKDETIDEQISKILEGTPALMVRSITQTMKVVDDVIKAAKCEPKKIIMEVTRTDEKKGQEVASRYIQLKKKISEDKGIDDKEREELLSDLEEANKTKKLKGKHLYLYFSQLGIDLYTGKKMKIEEVLEGKYDIDHIVPQSLIKDDSLDNQVLVNKKYNQDVKKDIYPICDEIRSKMLNLWYNYKERGIIKEEKYNRLIRTTDLTDDEINDFVKRQINVVNYSNVQIKRIFELKYPDTEIIFSKAGFPSLLRKEYEIAKMRDLNDAHHAVDAYLNIICGDILTSLYTDVFYLIKRKKEKKENPTFNMERRLLGYIKKNDLMNKIKSNCLRHDALITFKPDYDSGMFYKQTIFKKSGDKETGLIPLHTKGPMSDVKKYGGYSSLSQSYLLAVEYKVKKKTIKKLLRVPTMYVKLYGDDLNTIAKLMIDDEMATDIKVLRKIYLNQKIKYNGCYYLIYTKNEFVNKYKMAYQNYIDNDALVYLNKCLKKTDELDDKDKTEQEIIVNKDGDKLKITKEENLKIFKLIKEQYSKQIYESTPYIAKSKEMPEDAFNNLSIKKQIDTLFNMIKILSRSNEDAKFDKSLNNGSSKYFLKVNTITDDKIYIVNESPSGLFKGKEELI

SEQ ID NO: 692 - protein, 1418 aa, synthetic construct
  REGION 1..1418: note = MG44-307 effector
MNELNKEYTLGLDIGTNSVGWAVVDENRQLVRKGKQRLWGVRMFEESSDASARRTFRCSRRRLRRRKERINLLREIFKPEIDKIDSTFYTRLDESFFKAVDSTIFSKVVLEGLISNKDYYKQYPTIWHLRKYLCESTEKADIRLIYLAIHHIIKYRGNFLQEGDTYDQSDITNLLLVFNDISEAIVETNIALAEEDNETCNYLNSYLPNIEFNSDLVKEITIILSNVAEVTIGGKVYSNKGIKSKKNNLITLLNCKNTIYSELIIELLVNYSVKLQKLKMYKDDSREELEVNIYADDIDTKIDDACGMYSELYRVIQLLPNLKNVTDYVKLNELLGKHKSLSEAFVARYNEHAKDLKDLKYLIRTYDNNHKEYNEMFKVYDDKTPNYASYVGMTKINNKKYNFKHCSYEDFKKYVDKILKSIANNIDEKDLTLYDDIKQKLEDKTFLLRTNGSENASIPKQLHLSELRMILNNQAQYYPFLNEIDKEYNISNINKIEQIFNFKRPYYVGPLKGSNNSDFNWATVNNDRRVLPWNFNEVVDLNKSAEDFITRMLNKCTYLKGKEDYCLPKDSLLYSEYNVLNYLNTLKIDGVRISLDLRNELYNELFMKTPKVTSKKIKEYIYTHYAITLGENDVPEVNVTLNSVIKFKTIFSDDFDNKYDIIDNIIRDITIFEDKSILVDRLKNKYLLTDEQIKVIKSLNYKKTGTLCKNLLNDMIFYQVNPETGEILKSYNGILGIMREHMLNLQEIIFSPMFNVKQTIDEYNMKLMDDESKDSLVEFIDENIHVSPIYIRPYIQAIRIIDELEDILGTKIKYYCVEVTRTNKADKKKKTNSRYTTLRENIIKASEAFKDESLSINTKALLSKLDDERVINGVKNSDAIYLYFSQFGKCMYSGEDLDLEDIINGTNRSYDIDHIYPQALIKDDSLSNRVLVKKTLNNKKSDKFLPEAGVLSKDVHKFHKFLIDNNFISKTKYSRLSEKEVDYNVLSAFAARQKVATDQANKALITTLKLYKKVPEENIIYSKAENISDYRREYDLVKSRTANNYHHAHDAYLNAVLGKMFNDYFKNRHYLTNFKRNADERYQDTSNYLKIVKYKRYKLNSDEIIWRGSEDNEIIRKNITERFDILETTRTYISNEMFSKVTILPKGKGTVKVKSATPNGNLYDESVYGAINSSSFSKYSLIKYEHKGKTITELIAIPRIYLDTDGTNNKLLEYVKVLEKDNNLEILVPTVKINTIVADGKSELMITGKSNDTYLLKNAKDRRFSYKAIKIIHHIDKYNDMVKNKNNKYCFEEDKLTLHKSKFGDDIVITREDLDYVYNECINLFNKDIYAKLSAVKIVLNILTSLDTNTLDFNNYLSILGQILLFLKTNERKDIDLSLINGSKHAGVIYTSSKLKQGIKLVQYSYTGLKKKVIYEVK

SEQ ID NO: 693 - protein, 572 aa, synthetic construct
  REGION 1..572: note = MG44-308 effector
YHINTKDLLNRIDDETIVNGVKNSDAIYFYFSQLGKDMYTGEDIDLDDLLSSNSKYDIDHIYPQSLVKDDSISNRVLTSKALNNKKQNNFLCEAGVLAPGIYKFHKLLLENHLISKTKYNRLTEKEVDENILGKFAARQKVATDQAVKALITTVKLYKNVEETHIIYSKAENISDFRKEYNILKSRTANNYHHAHDAYLNAVLGKMFDDYFKSRQYLKTYRIKQENDEAKQETTNFMKIVKYPRTRSKTDLTPIWRGKEDIDIIEYNIKNTFDIQETTRTYIGNNMYSKTTILPKDNGTVKVKNFTPNGNEYDIKKYGGITSSSYSKYAIIKYKEKNKDVTQLIAVPRIYLDEDGTNTKLIRYIEDVLNIKDYTIEHNCIKTNVIIREEKTEYMITGVTSGHYLLKNAKDRNFDYKSIEIIHNIDKYLNMVSEKNNKYVVEQDKIILHSTKKNNGKFYNHNIEMTRENLDYLFKQIIALYSKDIYVNLTQTKAIIDLMKTSNFKLEINDYILLISNILDFLKTNERKTVDLSLIHGVKNAGIMRINSKLRTGMKFVQYSYTGLKEKVLYEVK

SEQ ID NO: 694 - protein, 1329 aa, synthetic construct
  REGION 1..1329: note = MG44-309 effector
MAKEKSTYQIGLDLGVGSIGWAVVDENNKLFRRRGQNLWGVRLFDEAKAAKERRLFRRQRRTINKRTWRLNLLKNELRSYVLKEDSKFFERLAKSQTKPEQYFLFDSKYNDTTYMREFPTISHLRVALQDEKKCQDYLNRGIYYRLLYLACHDILKTRGNFLSSSTLSGSSSNSIESINASIRSLIESLKEIDELFDLDYSFVQQALSNHLSGKEKINARKSDKATTFLKAILGYKFDLNKILEFSDEKLDYDFNSETWEETLTGDEVIDGILLNLFEIYRSIRLNVLIGEHKSLSYAKVAIYETHKRDLVKLKKDIKKIDETLKTNYFEELFLIDDTKKISYTNYVGKLLKDGIKKSANKKTSRDDLIKKLESIKKEYEDKTSDTKLLQFISNDGFLVKPTNKDNRLIPYQLHFSELENILELFQKLTNTEASKEQATHIKQLLKFKVPYFAGPLSNHTGDESSNYWLVKHHKFKDVKVTPYNFNKVVNKRETNKAFIGRMLRSCTYIPEEICVQQETILYQTYVFYNTINKVKINDTFLNKEQKQVLFDNLKTGKTLTKSRIISILGLPKNTDFTGFSKTDEEKPLQISLSAIKKFEKIFPEHKNNPFYQSFFDEVVNNITLIDSDEIEVRKDQINEIVKTYQTVNISSEQIDELARVKSTKWGNLSFKFLNVILFDDGEGELRTMIETLKDTNLNMMEILYKGENQTTIDKLSNKEYDLSDSNSLHEYLKTRYISPQARRTIIQANLIIDEIIKIMDGEKPTRISIEFTRENDAKKEETKSRMQQLSEIYKTLKLEHSQAELELEHLRTNKEEDKLKSKKVYLYFLQLGKDLYTGKPIDFDLLMSNSKAYDIDHIFPQSRIKDDSFDNLVLTSSVINGEKNNIYPLPKEVQDQNKDLWDYLVNKNLISRKKYERLTRITPLTDFELEDFVNRQKTTLDWINLEIANIFDIKYNDNKDSNFIIYSKSRHISSFRNEFKLLKFRELNDFHHAHDAYLNIVVGKLIQKNLYINSEGKFRTYNYERIIKKMMDKNIEYIKKIFKHHDILVTKKTTINSQGAYWDQNIIAPKDNGKNDGYAPIKNSLSVDEYGGYNGVKTAFFAALKINNKIVLEAIPTVDCGYFYDDKTFNIDKFRIYINNNFPKAEIVEPIIPIGQKVLLDGVPLRIAGKSKNSILFHNVSQLVLDNDSQKYLRQIFSIQRRYKGKKIEDSIWINSGFTQENNIILFNKIHSKLNTLHKKGKLYSEHTMSKINGEGNTKDIFANYSLIEQIQSLITILTKLLKANSSNQGRLFNVTYVDMPRSKVIKDSLSIIKESVTGFYTKTIDINV

SEQ ID NO: 695 - protein, 1329 aa, synthetic construct
  REGION 1..1329: note = MG44-310 effector
MAKEKSTYQIGLDLGVGSIGWAVVDENNKLFRRRGQNLWGVRLFDEAKAAKERRLFRRQRRTINKRTWRLNLLKNELRSYVLKEDSKFFERLAKSQTKPEQYFLFDSKYNDTTYMREFPTISHLRVALQDEKKCQDYLNRGIYYRLLYLACHDILKTRGNFLSSSTLSGSSSNSIESINASIRSLIESLKEIDELFDLDYSFVQQALSNHLSGKEKINARKSDKATTFLKAILGYKFDLNKILEFSDEKLDYDFNSETWEETLTGDEVIDGILLNLFEIYRSIRLNVLIGEHKSLSYAKVAIYETHKRDLVKLKKDIKKIDETLKTNYFEELFLIDDTKKISYTNYVGKLLKDGIKKSANKKTSRDDLIKKLESIKKEYEDKTSDTKLLQFISNDGFLVKPTNKDNRLIPYQLHFSELENILELFQKLTNTEASKEQATHIKQLLKFKVPYFAGPLSNHTGDESSNYWLVKHHKFKDVKVTPYNFNKVVNKRETNKAFIGRMLRSCTYIPEEICVQQETILYQTYVFYNTINKVKINDTFLNKEQKQVLFDNLKTGKTLTKSRIISILGLPKNTDFTGFSKTDEEKPLQISLSAIKKFEKIFPEHKNNPFYQSFFDEVVNNITLIDSDEIEVRKDQINEIVKTYQTVNISSEQIDELARVKSTKWGNLSFKFLNVILFDDGEGELRTMIETLKDTNLNMMEILYKGENQTTIDKLSNKEYDLSDSNSLHEYLKTRYISPQARRTIIQANLIIDEIIKIMDGEKPTRISIEFTRENDAKKEETKSRMQQLSEIYKTLKLEHSQAELELEHLRTNKEEDKLKSKKVYLYFLQLGKDLYTGKPIDFDLLMSNSKAYDIDHIFPQSRIKDDSFDNLVLTSSVINGEKNNIYPLPKEVQDQNKDLWDYLVNKNLISRKKYERLTRITPLTDFELEDFVNRQKTTLDWINLEIANIFDIKYNDNKDSNFIIYSKSRHISSFRNEFKLLKFRELNDFHHAHDAYLNIVVGKLIQKNLYINSEGKFRTYNYERIIKKMMDKNIEYIKKIFKHHDILVTKKTTINSQGAYWDQNIIAPKDNGKNDGYAPIKNSLSVDEYEGYNGVKTAFFAALKINNKIVLEAIPTVDCGYFYDDKTFNIDKFRIYINNNFPKAEIVEPIIPIGQKVLLDGVPLRIAGKSKNSILFHNVSQLVLDNDSQKYLRQIFSIQRRYKGKKIEDSIWINSGFTQENNIILFNKIHSKLNTLHKKGKLYSEHTMSKINGEGNTKDIFANYSLIEQIQSLITILTKLLKANSSNQGRLFNVTYVDMPRSKVIKDSLSIIKESVTGFYTKTIDINV

SEQ ID NO: 696 - protein, 1378 aa, synthetic construct
  REGION 1..1378: note = MG44-311 effector
MYYLGLDIGTNSVGWALMNEEHKLIRKNGKRLWGVRMFEASKDASERRLARSSRRGIDRRNERIDIVRELFVNEINKIDPSFYERLDESFYVAEDRKYPEYHNMFNTGLTDKEFYDKYPTIYHLRKELLVNHEKTDIRYLYLVISNMMKKRGHFLATGDEFNINNTSVIKDNLNKIFDMTKDLAEQWSQNDDFCEENYFDLPELSNEWIDNFVAIMIQTTSKTNKKIALKELFEAENKSFVDEVIIPLLIGSKVKLNSLKLVKDKKYESCEISINVEDLDAQLNEKEGIVPEFDTVFVMLPLIKEITDYFYLDNLLKGSLGLSDAMIKKYNEHKEDLKKLKDLIKKYLPNKYYECFKQSKSKKAAKGDKSTKEICNYPAYIGLNTNHKTKKLERFAHCSREDFYKYIRSLLEQIKVNEAQDTINEFYLKMENNNFLLKQNSEQNAALPMQLNKTELKTILNNQKEYYPFLTEKDSEGLTVIDKLIKTFEYKRPYYIGPINSHANNAWAVRNPEYENVHITPWNFDKAFNKDESAKAFIERMQNKCTYLKGKDDYCLPKFSIIFSEYNCLSYVNKIRINGELISKDLKDQLMMNVFKKEKQPTAASIKKYLKTKNIDIDDALPLVTCNMSSYIKMTSIFGENYVDTHIEQIENIIKDITIFEDKAILVERLQKLYHLDEEKIKQIKDLNYTKYCSLSKRLINGLTMNNGQTLLEVMRETNLNLNEVLYSPDYNYNEIIDKYNQEITKSLDEMTLEEFMKENIFMSPDMHRPLIQTLNIIDELEHIIHHPIDKYFVETERSNKQVKGDKGVTVSRYQRIQECYKNAKDISLDLVAELENNKDKLKSDKIYFYFAQLGRSMYTGKKIDFDDLFNDNLWDIDHIYPQSLIKDDSINNRVLVEKTINNQKQDKCLYEINNLLDPNRAGLYKKLLDMQLISKEKFRRLTQKEISKEDINGFINRQNVITNQAVSSLMDILKMYKKVDPKNIIYAKAENVSDFRRDFDLPKSRTANNFHHAHDAYLNVVVGDVLNTYYTYNGVYFFDSYDRMKTEHKTINAQRIMHASSLSNKRTGEVYWDLKSALKQINHDLYETFDVLETTRMYNDNHLYSKMTILSAGNGTVPRNNKISNIERYGGITSDSYCKFVVVKNVTFKKKEEKTEYYLIAIPKRYEHNEEEWLKEKGYNNAEIIINNIMKNVIIENNSLKYMITGVTNDNFLIKNACDRYFSKNEILTIKHIDKYLNNLQYKENMIINEESVIVSLAKDNNCKEIVLHKNEIIHLINNISQKYTLSIYSYSVLKEINNKLNNCNLNNYDIRDLIDICSNLLLLLKTNERKSAKLKLIGGSDNSGILVITKTLQPGAKIITESVTGYYKKVLFEVPQ

SEQ ID NO: 697 - protein, 1340 aa, synthetic construct
  REGION 1..1340: note = MG44-312 effector
MKKDFYIGLDLGTDSLGWAATDTDYNFLRLKGKTAWGSRIFEGAKSKKERRVYRSSRRRKERQKYRIQLLNSLFAEEINKVDKTFFLRLENANLHMEDKDKSIDSKYLFKSIEEEKLFYDKKDNYPTIWHLRKALINGDSFALSDLRYVYLAIHHIIKYRGNFLKEGETNYNNVNEEVIERINNCLSLLAENIEEESSSLSKAKLTELKNVLLDKNINKTAKKKKIIELFDVVSCKEYIDMFAAIVTGGNYKLSKIDKALESSINFTENFEETEDQIAQDLGDAFELVKCAKELYDFASLKELMGNEKYISFVMANIYEEHKEDLATLKKVIKEIDKNKDLSGKDSLYHLVFKNEENNNYAALVGVNSKNKKITLEDFNKEIEKILENNKEIIEPSDYKELDEKVKARQLLRTIAHNSTSLIPHQVHLIELKEILKNAEKKYPFIKDISEKIITLFKFRVPYYYGPLDSRSEFAWVERKSNEKITPWNISKIVDDSATKEKFIKRLTNNCTYLLGEKVLPKVSLIFEEFMIRDRLNTMILNGALLTNETKSLIYNYIISRNKTTVAQIKSFLKNKTATKENDITISGVKEDVPFEATSHATLGKLFDLKHDFDKVEHLIFLATIYADDKKSFKALLTNSKDLSKEQIKAILNLPTKKWSPLSKKLLCGISYVDDNGIAMSILDVMRETNQNFQMVYNNKDYGFKDLVDMHNNEITGNLSTNQKIAMILEDTPTITKRSINQALLVLDDIVKASGNNPKKIFIETTRENDAKSKGKEKDKRYVELKRLISKDREIVSKENKKELLNELELNQANVKGRHLYLYFKQMGLDMYTGEKIKIEDVFDSTKYDLDHIVPQSLIKDDSLDNLVLVNRLANQRIKGSQYPLPRELKTDKVIKTWQYLHKIGAISDKKYNSLMRTSEITLEEIEVFVNRQINVVDYANITLRNVLKIKYPNTQLVFSKAWYPALLRQELNIAKNRDINDAHHAVDAYLNVVAGNELTMKFSNVRRIYAERSNKEDKDSRSLNMDGYLKNFVKKLDRNGVTYAEKIKKNALRHDALVTFKVDYQNGALYNATIYRKANDSNLIPIHTNGPLADVSKYGGYSDLSQAYIVAIEYNIGKKRFKSLSRVPLLYIKLYGNNNETLWKKVIGNDLASDIRVIKRIYLNQKIKYENCIYLLYTSNEICNNYKLAYQSYLDNELLDYVNKSLSIAEKIIDCNETSFSMKTNKNDGCFEVSKIKNMKVFIALKDIYAQSIFESCSFIVRARNIMCDKFESLTLYEQIMTIKNMIILLNRKSVNAKFNSVFAEMKTNLMRPSKNIKTGQNITLIYESPSGLYKHEEKI

SEQ ID NO: 698 - protein, 1080 aa, synthetic construct
  REGION 1..1080: note = MG44-313 effector
MKFEEIYFGFDLGTKNIGYAVTDADYRLLRIDKKRAIGVRFFDEAKTAMDRRVYRCARTRLKRRKYRISLLQEIFDEELMKKDPNFLRKLNENDLKTEDSFDSGLKYSLFNDRAFNDKVYYKKYPTIYHLRKALCEGSTDDIRLLYLAIHHIIKYRGNFLFNGNMDDCRNPLPIFEELNEYLYSRHTALNMPDDDLFGQKINDIEQLDTDGINNFGKLITDKLSKKDKKIKAHELFQATATQKPLLDTIFGGSVNITKLFGADKYPKDTFRDFRFSDDFEQIEASLSSVTDETDFNIILCLKKLYDFQTLIGLLNDKDSLSGAMVDIYNQHKSDLKNLKYIIGKYAADKYSLMFDEPSVTQKDIPELDKKNNNYSKYIGGGVYNGVKLGKCYDDDGRLIADKTKVSRNGRLGKTCTQEEFYKTVKAVLLKLKVDTADEEIYKNILLRIEDGIFMPKIVSKANSALPYQLNMQELDKILKNAVNSGNYPFLQKIEDGYSVCDKIKLLLQFRIPYYVGHVKEYREGGNCSKNSWAVRKQSGRVTPWNFEDMIDIEKSKVEFIQRMTTNCTYLKNQKTLPKNSVLFGKFVALNELNKLKINGEPINVELKKSIYNDVYLNKKVNKENIIQSVKRLTGVSDIILTGIDEAMHGDMDVYRKFKRILSDKVDRYPDMIEKLIFLMTIYADDANIIFNAVCDEFVKNKKILTLDEAKKLRGIKFKGWSALSQGLLAGSTMGKNEGLILTDELGQKKDIIEILYDTNLNFMQIINDKRFNFKEALNEYNIANGIVENNEITYGDIDELYCSPSVKKIVWQTYEMTKELVKITKSIPSKVFLEVTRSNDDRDKKAKKRTKSRKEIIDAAYQEAINIVKQNKKSIKDKIDSNIEDIASYKNMLQDTNNNSLNSEKLFLYFMQLGRCAYSNKPIDLDRLKDYDIDHIIPQSKVKDDSLNNKILVEGKLNKEKGDTYPVLPKFRTNAKSLWDTLLKLKLMTDDKYSRLVRQKPISSEEQEKFINRQLIETAQSVLSARDILARYFKGLCNQYNIDKEVEIVLSKAGNVSDFRKSFGLTKSREINDFHHACDA

SEQ ID NO: 699 - protein, 1520 aa, synthetic construct
  REGION 1..1520: note = MG44-314 effector
MKFEEIYFGFDLGTKNIGYAVTDADYRLLRIDKKRAIGVRFFDEAKTAMDRRVYRCARTRLKRRKYRISLLQEIFDEELMKKDPNFLRKLNENDLKTEDSFDSGLKYSLFNDRAFNDKVYYKKYPTIYHLRKALCEGSTDDIRLLYLAIHHIIKYRGNFLFNGNMDDCRNPLPIFEELNEYLYSRHTALNMPDDDLFGQKINDIEQLDTDGINNFGKLITDKLSKKDKKIKAHELFQATATQKPLLDTIFGGSVNITKLFGADKYPKDTFRDFRFSDDFEQIEASLSSVTDETDFNIILCLKKLYDFQTLIGLLNDKDSLSGAMVDIYNQHKSDLKNLKYIIGKYAADKYSLMFDEPSVTQKDIPELDKKNNNYSKYIGGGVYNGVKLGKCYDDDGRLIADKTKVSRNGRLGKTCTQEEFYKTVKAVLLKLKVDTADEEIYKNILLRIEDGIFMPKIVSKANSALPYQLNMQELDKILKNAVNSGNYPFLQKIEDGYSVCDKIKLLLQFRIPYYVGHVKEYREGGNCSKNSWAVRKQSGRVTPWNFEDMIDIEKSKVEFIQRMTTNCTYLKNQKTLPKNSVLFGKFVALNELNKLKINGEPINVELKKSIYNDVYLNKKVNKENIIQSVKRLTGVSDIILTGIDEAMHGDMDVYRKFKRILSDKVDRYPDMIEKLIFLMTIYADDANIIFNAVCDEFVKNKKILTLDEAKKLRGIKFKGWSALSQGLLAGSTMGKNEGLILTDELGQKKDIIEILYDTNLNFMQIINDKRFNFKEALNEYNIANGIVENNEITYGDIDELYCSPSVKKIVWQTYEMTKELVKITKSIPSKVFLEVTRSNDDRDKKAKKRTKSRKEIIDAAYQEAINIVKQNKKSIKDKIDSNIEDIASYKNMLQDTNNNSLNSEKLFLYFMQLGRCAYSNKPIDLDRLKDYDIDHIIPQSKVKDDSLNNKILVEGKLNKEKGDTYPVLPKFRTNAKSLWDTLLKLKLMTDDKYSRLVRQKPISSEEQEKFINRQLIETAQSVLSARDILARYFKGLCNQYNIDKEVEIVLSKAGNVSDFRKSFGLTKSREINDFHHACDAYLNIVVGNGLNEKFSHNKDYRENIDSEHSKSYNFKKAFESNIYSYREKRVIFYPQSGPDSTLSVINKELSIPNYNVSKKIVSGKGELYKATIFKAGVGLDDDVLYSRVEKFDKDGMYNPKSDTSKYGGFKHSGTAYFLIIDSKDRKGNTVRSVEAVPIYYAKKISQKKLSTEAFLSDVLKLNNPKPAVIEGLKSSKLLVGSLLEFEQYTGEKEQKTITFRLRLSGKTAERLTFHNANELIADKATNDYVKELSLTMDKINKAFIKNISIYKDMDKEKIRPEIYDELKNEKIRRINTENQMSNIIMLSKEQNLCLYDLFIKKVTDSNSPYTYLPSYNCFAATLTKSRDCFAEMDEYAQLSVLLKIIKAFQCNPDMADTSNLNYIEKGKSISGKKNQCKITFSNKIYEVKKKASDNKFKRIDFISQSVTGLKEKRIKISYGV

SEQ ID NO: 700 - protein, 1603 aa, synthetic construct
  REGION 1..1603: note = MG44-315 effector
MENSNNSKKYYLGLDMGTDSCGWCVTDDKYNIIRSRKKTYGPDGKLIKREGCHLWGARLFGSANTAKNRRLNRTARRRLARRRRRIILLRELFQPEMDKIDPNFFRRLDQSNLWNEDKDKELQMEHNFLFNDKDLTDKEYYKDFPTIYHLRKAMVNGLTINGHYYDPKKQFDIREVYLVLAHMIKYRGNFLMEGDVQGSVVDPTYLKQCFDNIDNLIKNSIDEDNADKEDDDKIISSEYCFNVDIKRANRLINLFKNESGKQNLKDSEKIEFGKNLTGIRQSLLSLINGSAVSLKDLLPKDQILDEEFGKNKIDFSKESFENDLDSYNLNDFYSQVLLEAKKIYDFRILAHLLHDNRLLCDAMVNVYKEHKEQLAALKRLYKKFATKEQYYFMFRDPKILGLGDSNGKNKKKSKVKNQPKASYVSYIGYTKTSGKRKYTGAHVTKEEIIDDLIKQIKDDIGSSIGKYAKYIISKENAYKKDKKGKETLKVGAYKVRLSNNPNNEETIFYTANDETLIGNEKKDNPYFFEDSKEKKDSVLIMKALESKIRFLPRQNSRNNGVFPYQLNLNEMRTIIENQSKYYPFLRDKAPSFPDGKTEEYKIVSLLKFKIPYYIGPLSQPNDYVRDDKRDNRWVQFKGENNQGIINPWNFSQIVDLEGTADKFISNLTNYCTYIFGENTLPRESLIFQAYKVLNDLNNLKVNGSLISKEDKDYIIQNVYLKKKKIKGKDIVNALKNKYKLSDEDPTVTTKGSGKSIGEDEVDLTMFNSSLSSFIDMSNPNAFGPEFYKDSSKFELAEKVIELITIVEDKELLKERLKKLELSDNQVNYLFKQKYSGWAPLSRKLLDGITIDCVNENTGEAYPVTIIDVMRDTPLNFMEIYETKNSQFSGFKEKVAELNDEKNICRDDLIDESYASPAMKRSVRQTFKVIDELKNTLNIDHFDRIFVEATRAPGEAGKMVKSRKKQLEVAYEAAKDLVDQKLRENLEKQTDEKLRRKKVYLYFMQLGRSVYSGEKIDLDKLDENYDIDHIIPQAKLKDDSFNNMVLVERELNNKKQDNYPIPSTILSEQGKKWIQILANIKDKNKRSYFMPKDKANKLLRPESKQLTSDELNGFINRQLTMTNQSVKAVCDILKMTETKKGSEVVYSKANLVSDFRKLCGELKPSYVAFVKVRDINDFHHANDAYLNIVVGNVYYEKFKNFYKYNHVEYDTNGKKDLSVLASKLFTKTQADDKTGNIYWEAHFHNEKEIDANGKERTIKVRDKGTDSTFDKIEHYMELNDPLVTQMRYTLSGKQGFFNKITIKTKAKENEDNSGKLFPLKQHLRSDNNKVMDVNKYGGYSDMSTPYFILVKSDGKKGKHIYSLESIPTINLRSFKNSEEDIINYFEKEKKLKNPIILAPKLIMRTIVKVPCSQTDSFIKLGLSGRTGNSIVYINLSELFLPLEWKNYYKIISNLLGTNVSSGKAKDLSKYNDQMENDPTSTLVDGSNKVEHDKNNRFFSYLVNEVINKPIFEELPKSSGSFINLESKYDEFCSLNTLEQAKIIATIIKLLSCKSVKEQDLSKLKGLPSSLGGIELNKNLPSGTLISKESSCGLKENIIFVVPND

SEQ ID NO: 701 - protein, 1334 aa, synthetic construct; identical to SEQ ID NO: 611
  REGION 1..1334: note = MG44-316 effector

SEQ ID NO: 702 - protein, 1378 aa, synthetic construct
  REGION 1..1378: note = MG44-317 effector
MEKKYYIGLDLGTSSVGWAATDENYNFLRLKGKTAWGARIFSEAVDCKGRRSFRSSKRRVARRKYRLLLLKNLFAEEMAKVDKTFFLRLENSTYWAEDKAKDSEGNDLGKTLIFKTTEEEREFHKAYPTTWHLRKKLVDNDEQALSDLRLVYLAIHHIMKYRGNFLSDGTKDNEEPSKDTIDRINVILNLLEAKDNESGVSDNITYLSKESYNELIETLEDKNLNKTKKQDKIKKLFKNVDKTNEDIKVYIDLFKTLVTGGVFSVKKINEEYDKLKIDFNNGFDDNADEISKALGDAYELVLIAKAYNDYISLKDLLGGNPYLSYVMADIYDEHKKDLKSLKKILVSIDYKLGNEGSNRVYNLVFKPVIVPKEERKDKDGKKNKKLTTPNYASFIQGDDVEKKSVTLENLNKNIKEILEANKQYVDEIDKEEFDRLLDKASNNELFKKQATVSTSLIPHQCHLKELNKILENAGEKYPFIKENSDKIIQLFKFRVPYYYGPLNNESKEHAWIVKNEGKERTKITPWNIDEVVDKGRTRDGFFKKLTNSCTYLVGETVLPKVSLVYEKYLALERLNKMQVNGNYLNHKDKIDLLNYVLGNSNTTIENIRKKLASDTGMKINDIVISNIKNNVPFTATSHAFFRKHFNLENSKEFELCEEVIKYATIYADDKKELKKFLSENFSFDEKLIKEIANLQTNKWGRLSKKFLCGGAKDEMYYTDENGVMYTILDLLEETNQNLQEIVNSGKYGFDEKIKEFNDALTKDETIDEQISKILEGTPALMVRSITQTIKVVDDVIKAAKCEPKKIIMEVTRTDEKKGQEVASRYIQLKKKISEDKGIDDKEREELLSDLEEANKTKKLKGKHLYLYFSQLGIDLYTGKKMKIEEVLEGKYDIDHIVPQSLIKDDSLDNQVLVNKKYNQDVKKDIYPICDEIRSKMLNLWYNYKERGIIKEEKYNRLIRTTELTDDEINDFVKRQINVVNYSNVQIKRIFELKYPDTEIIFSKAGFPSLLRKEYEIAKMRDLNDAHHAVDAYLNIVCGDILTSLYTDVFYLIKRKKEKKENPTFNMERRLLGYIKKNDLMNKIKSNCLRHDALITFKPDYDSGMFYKQTIFKKSGDKETGLIPLHTKGPMSDVIKYGGYSSLSQSYILAVEYKVKKKTVKKLLRIPTMYIKLYGEDLNTIAKLMIDDEKAINIKILRKICLNQKVRFNNCYYLIYTSDDTRCKLKMAYQNYIDNDALVYLNKCLKKIDELDDKDKTEQEIIVNKDGDKLKITKEENLKIFKLIKEQYSKSIYNSITYIVKSRDILEDSFNNLSIKKQIDTLFNMIKILSRSNEDAKFDESLKNGGIKYYRISMNIDNNQIYIVNESPSGLFKGKEELI

SEQ ID NO: 703 - protein, 1033 aa, synthetic construct
  REGION 1..1033: note = MG44-318 effector
ENSNKIFKDNFNKIFKATDEKSNYVNYIGYTSKDGKKINVKKCKDEDFFAYLKKYLLSLTNVKDELARDEIIKELDNGTFLPKILHSDNGLFPRQINEAELNKIVANMVKNHPETAAFADKIVKLFEFRIPYYVGPLTGDKSGDGSKNKSWVVRTDEKITAENFDRVFADENGIVDKAKSNEEFMRRMTNKCTYLRGEDVLPKASIMYQKFDTLNQLNKLKINDRPISVELKKKIFEELFRTYPKVTDKKIKEFLVKEGYISSEEAKEIALTGKDGDFKASMSSYIRLKKILGDFVDKDLKTNGGVCENIILWHTLNTDKNIVEKLILKNYGHIPEIKAAISQLKGLTFNDFGKLSAKFLNGIEGTNKATGECMTLLDALYETNENLNEILFDDNFDFADIIQRENGEKNTEITYEDVEELYVSPAVRRGIWQTLLMIDEYVAAVGKTPDKIFVEVTREDGKKGDEGRTQPRKRQLLEKYKNLDAAYADVIEELKSDEYTDFELRKERLFLYFRQLGRCMYTGEPIEIRDLDKSNIYDVDHILPRSYIKDDSLDNKVLVLRNKNKVKDNNYPLPAGFVDKKQYEFWKMLLDRKLISHTTYDRLTRTAPLDDDDYGYFLNRQKVITDQTAKAVIELLKRKYPDTKIVFSKAIDVHDFRKKFKLFKCRETNDLHHARDAYLNIVVGNVYSTVFPAQERYYNDGTGWHRYNLDKMFTRNVTGAWDTEGSIKIVKRTLEKPSMMVTRYASCEKGGFYNQTVCGKNDTSVTAPRKGKGPLDDTSKYGGYNTQTTAYFAIVSSTGKKDKKIKTIEAIPVLTSYRAKNDPDAVAKYLADTFENLKDPDFLLSKVKKYQLVSYNNTLCYIAAITGNYIIAYNANQLFTDNKTDEYVRELVKILKLNDKNMIKKDESEYPTKVNSKEGKKLSVTAEMNIKFYRYLKDKMNDKIFAGISTFKKFSKALANGEEKFVSLSIIDQSKVLLQILKFLKCNGDTADTRLIGGSGRSGTIYLNKDITDVDFKIIDLSPAGLTERIRRV

SEQ ID NO: 704 - protein, 1302 aa, synthetic construct
  REGION 1..1302: note = MG44-319 effector
RGKDLWCVRLFDEANTAAERRNFRTMRRRLERRRKRIIWLQELFAPYINDATFFIRLNDGGLLAEDKSEPIKGDKNTLFGGEYDDKAFHKQFPTIYHLRKALMDGGGYDLRLYYLALHHIIKYRGHFLFEGGINDIHDLSKLITDLNGATETVFGEDAFKFDESLSAEAKGVLTDKTKGVKDKQSGLEKIFGAIDKVTKEIIKGICGGKISPSAIFGDEYKEEKSFSFKDLSDETFASMESVYGDDFIVLSAIRAIYNFVTFEKLLSGYEDISSAMIAIYEKHKSDLKKLKTFVKNETPDEYNRIFKSTKESANYVNFIGYTKKGGDKKKVEKCKDEDFYAYVKKYLNSLCDVKNEEARSEMLADIERGEFMPKILHSDGGLFPRQVNEAELAKIAENMVMAHPETAAVKDKLLPLFRYKIPYYVGPLAGKNSWAVRKEGEITPWNFNDKIDLAASNEEFMRRMTNKCSYLRGEDVLPKASMIYQKFDVLNQLNKLKYDGRALSVELKQKIFNELFTKYQKVSDKKIIELLIREGKISPNEKAAALTGKDGDLKASMSSYIRFKKILGDFVDTDEGFTICEKIILWHTLNTDKSVVEDLIKKNYGGVKIIKDNLKVLKGLTFNDFGRLSEKFLTGLIVPDKSTGEMFSILDALYETNENLNELLFDERFDFMGAVKEENGECSEEVTLKDVEELYVSPAVRRGIWQSLTVIDEYVAAIGKSPDKIFVEVTREDGVKGDAGRKLSRKIQLAEKFKGIEQTYSEIAAEFNSDTITDMRLRQERLYLYFRQLGRCIYTGERINLGQINDATLYDVDHILPRTYIKDDSLDNKVLVLRSANAEKSDTYPIPDKFRKQSEFWKMLLDKTLISRTTYDRLMRTAPLTDDDYSDFINRQKVITDQTAKAVAKFLERKYPNTKIVYSKAKNVNDFKQEFKIFKCRETNDLHHARDAYLNVVVGNVYDTVFSTPMSMFRQDGDKWRAYNLKNLFKRDAVGAWNVKSSIETVKNTLKKPSMTVTQYAFSNKAEFYKQTVWGKGDPAITAPRKGAGALFDASKYGGYKGQSTAYFAIVSSVGKKGEAVKYIEAVPVLTTYQAKSDDGAVQKYFESYLKNPVILVPKVKIRQLVSFNGTLCYLAGITGNQIIAHNANQLFTDNKTDEYVNALLKIVEMQSKNMLDLYSDSLVIKTNSAGDEKLVVDKDKNLELYQRLTNKLNEKIYSGISAFSTFKNNLLNGEEKFAELELSEQAKVIIQILKFFKCNAEISDLTPISGSKRSGTVLLNKNITDVDFRLINRSPAGLTEKVRRV

SEQ ID NO: 705 - protein, 1348 aa, synthetic construct
  REGION 1..1348: note = MG44-320 effector
MNKDYYIGLDIGTNSVGWAVADQDYNLLRLKGTHAWGARIFKEASSKKDTRNFRSSRRRYARRKYRIQLLNQLFAEEINKIDSTFFIRLAYSSYWEEDKIDKGISKSLLFKTREEEILFYKKYKTIWHLRQSLIKNEQEAFQDLRYVYFAIHHIIKYRGNFLLEGNINTNQLNETYIEDLNHFLKDKYMELTKDEFESSSSFISKEQTIDIKNILLDKNKNSRTKNKEIKKLFSSNDILEPYIDFFTTLVTGGKFQLKKLNLDSPIEGEIQLSNPSFEEMEGTLKDDFKLVMIAKQIYDFVSLHDILHDKEFLSDAMVDFYDIHQKDLKKLKNIIISIDKNKGFKDEKERLYYKIFKCKETINYSAFVHKNSNVQRPPIEKFNTEIAKILSENQSFVPANKENDFQDLLKKAKDKELLKTISIQSTSVIPHQLHLNELRIILTNAQKYFPFLNNISEKLELLFTFKVPYYYGPLNDKSPYSNVKRTQYATVTPWNFKDIIDENQTREKFMKKLTNTCFHLMGETVMPKKALAYEDFLIYNRLNTLMVNGNYLSTQDKKQFYEYIISRPKTTLEQLKKEIAKRENLNLLDITFSHIQENIPFEASSHAALMKFFDVEKEQKKLEKLITLATIYADDKKSFKILLEKEKNLTEEQRKVLLNLPTKKWAPFSYKLLNDIYYQDDAGVIFSILDIMRLENKDFQMVLNDEQYHFKDLILQENAQIMQNKTPQDLIDEKLETVPSNVQRSIRQTLLVIDDIIKAANNKMPQKIFIEVTRSNDDSKKGKESISREKELTQFIDELFKDPEINQFPNMDLDKLQKELQELDKIKLKGKHLYLYFKQLGIDLYTGLPIDINEVLDSTKYDLDHIIPQSLLKDDSLDNLVLVNRKINQKEKGNQYPLSAEIRSKNKNLWKYLLKKKAISDKKYDHLTRSSEIKLNEIEDFVSRQINIVNYSNIVIRDILNIKYPDIKVIFSKSQYPSFIRKHLNIVKNRDVNDAHHAVDAYLNIVSGNILSTTFSKKYIIETFNKIKFDDKRTFNMESILENYFKKEQNVNKIKTNCFRRDALVTYKLDYYSKNGAFYEQTRSPKSKNLIPITFKPDNALKDTSKYGGYSDITQAYLLAVSYQEGKKFKKALLRVPYLYTIMYKNNSDELLKKIINNPKAENVKILRKIHLNQKIKLNNGIYLIYTNSENKNKYKMAYQNYIDNKFLLYLHQANKHFNDISEHLNEQTFIINSKNDEFLISKEKNREFFTYLLNKTKNKVYNTCNYIVKARETNIEVFEKLNLKEQIDVLNQWIKMMSRDCEKVTLNKKFNNLIECKLILTKNINPNNTITIIYESPTGLFKHEVKI

SEQ ID NO: 706 - protein, 1339 aa, synthetic construct
  REGION 1..1339: note = MG44-321 effector
MIENNYYIGLDLGTDSLGWAVSNENYDLIRLKGKTAFGARIFSSAEDCKKRRMFRSSRRRLQRRKYRIYLLNQLLAEDINKVDSTFFERLKYSYLVLDDKSKKNISGNLLFKTRQQEVEFYKKYPTIWHLRNALIDNNHKLHDDALSDIRNVYLALHHIIKYRGNFLSDGNINLKEMDLSLFDRLNKLFCLYIEDNDNIDVDFDVIQKSDYDKITKILEDKQTNKIQKKKCLKSLFKMDYAKDLIECFYTLIVGGDYDISKITNGESLKISFEKNYDEYEEIIKNELNENFEIIQIAKQIYDHILLKNLIGDKKSISEVMVEVYETHKQDLKLLKDVIIGIDKENGNHDLYKSIFKNEGKNNYSAFVHHNSDNDRITIDDFNVEIGKILDSNKDKIEEKAYQYLKEKTEKKKLLQIIANVSTSLIPHQLHLIELKIILDNAKKIYPTILENEDKIIKLFKFRVPYYFGPLDSRSINSNVDRKSNKTITPWNVEEIIDYSKTKTNFMKKLTSNCSYLYDCKVLPRASLIIEDYQIYDRLNALKINGAQLDLETKNKLYLKIISQNKTTIQSLKNYLKNSEGFKGNVLFDGIKEDVPFEASSHALLRKCFDLEKDFDLLERCIFLATIYADDKKAYFEEVKNEFPTLTKEQYNNLKSITPKKWSRLSKELLTELYYVDENGVTHSILSLMKNTNKNFQQILFDKEYKFNLLIDSKNKEMSGEKTDNEIINNILENVPAITRRCINQTILVLDDIVKASKKEPAKIMIEVTRNEEKDKKEKDSRKKEVENFLNSIIKDSKNEYYKNQASKLVDELNYIENDANKLKGKHLYLYFKQMGCDMYTGEVINIHDVLNSNMYDTDHIIPQSLIKDDSLDNLVLVKRTINQTVKKDLYPIPRDIKTQKVKDLWKYLFSIKAISEKKYNNLIREKEITFEEIEQFVNRQINVIDYANISIKNILEIKYPNTKIIFSKSHYPSFLRKELNIVKNRDLNDAHHAVDAYLNVVCGNILSTRFNDIRKIYELKISGNKDKSTTFNMESVLLCEINKQKLFDKIKNNSFRHDALVTYKVDYNNGALYKQTIYKASNDESLIPIHTGKEFSEFNDTAKYGGYKSLSSSKMSVVTYIEKGKLYKKIISRKIIYDKQINNDEEYLKKILGDVSNPKSICDLYLNQKIEYDGGIYLLYTSNENQNKLKMAYQNHMDNNDLFYLNHANKKVNDFKDDALEYKIKDKNDNLIVTISKQENEIIFNKIKDLLNNKIYDSCNYLKKLRDLDNFSSFNIKDQINIINNLIVAMSRNSEKSKLMSYYKEAGNAKLLITKDITKNNIKIIYESPTGLFVKKKKI

SEQ ID NO: 707 - protein, 1393 aa, synthetic construct
  REGION 1..1393: note = MG44-322 effector
MKNNEETLKKLRLGLDIGTNSVGYALLDENNKLIKKNGHTFWGVRMFDEAETAKDRGSYRKSRRRLLRRKERMEILRSFFTKEICDIDPTFFERLDDSFYYKEDKKNKNTYNLFTSEYTDKDFYLEYPTIYHLRKAMQEEDKKFDIRMVYLAIAHIIKYRGNFLYPGEEFSTSEYTSIKQFFLDFNDILDELSNELEDNEDYSAEYFDKIENINDDFLEKLKVILMEIKGISNKKKELLDLFNVNKKSIYNELVIPFISGSAKVNISSLSVIKNSKYPKTEISLGSEELEGQVEEAISVAPEIKSVLEMIIKIKEISDFYFINKILSDSKTISESMVKMYDEHNEDLKKLKGFFKKYAEDQYNEIFKIRDEKLANYVAYVGFNKLRKNKVERFKHASREEFYGYLKQKLNNIKYAEAQEEIKYFIDKIDNNEFLLKQNSNQNGAFPMQLHLKELKTILNNQEKYYPFLSEGNDGYSIKEKIILTFKYKIPYYVGPLNKESKYSWVVREDEKIYPWNFDKVVKLDETAEKFILRMQNKCTYLKGDNDYCLPKNSLIFSEYSCLSYLNKLSINGKPIDPIMKSKIFNEVFLIKKQPTKKDIIEFIKTNYNADALTTTEKELPEATCNMASYIKMKEIFGKDFNDNKEMIENIIKDITIFEDKSILGNRLKELYKLNNDRIKQIKGLNYKGYSRLSKNLLVGLQIVDNQTGEIKGNVIEVMRKTNLNLQEILYLDGYRLIDAIDEYNRKNSLNDSYLCARDYIAENLVISPSFKRALIQTCSIIQEIERIFHKKIDEFYVEVTRTNKDKNKGKTTSSRYDKIKKIYSSCQELAMAYNFDMKRLKNELESNKDNLKSDILYFYFTQLGKCMYSLEDIDISDLTNNYHYDIDHIYPQSIIKDDSLSNRVLVDKKKNAAKTDKFLFEAKVLNPKAQQFYKKLLSLELISKEKYRRLTQKEISKDELEGFVNRQLVSTNQSVMGLIKLLKEYYKVDEKNIIYSKGENVSDFRHTFDLVKSRIANNFHHAHDAYLNVVVGGILNKYYTSRRFYQFSDIARIENEGESLNPSRIFTKRDILKANGKVIWDKKEDIKRIEKDLYHRFDITETIRTYNPNKMYSKVTILPKGEGESAVPFQTTTPRVDVEKYGGITSNKFSRYVIIEAHGKKGLDTILEAIPKTACGDNNKIEKDIDNYIASLDEYQKYTSYKVVNYNIKANVVIQEGSFKYIITGKSGNQYVLQNVQDRFFSKKAMITIKNIDKYLNNKKLGIIMAKDNEKIIVSPARGKNNEEIFFEKTELVNLLKEIKTMYSKDIYSFSAIQNIVNNIDCSIDYSIDDFIIICNNLLQILKTNERKNADLRLIHLSGNSGTLYLGKKLKSGMKFIWQSITGYYEEILYEVK

SEQ ID NO: 708 - protein, 1336 aa, synthetic construct
  REGION 1..1336: note = MG44-323 effector
MNNNYYIGLDLGTDSLGWATTNEYYDFLRLKGKTAWGARIFSSANDCKQRRTFRSSRRRMQRRKYRIFLLNQLLCEDISKVDSTFFARLQNSHMVWDDKKKLNLSRNLIFKDKNEEKSFYKKYPTIWHLRNALINKDVNALSDIRYVYLALHHIIKYRGNFLKEGKLNIQEFNFSLFSDLNDIMKEYIEEKNEIDVDFDVISNDSYQEIINIIEDDKTNKTEKKKKLKELFNCSYSKEIIECFITLSVGGEYDISKLSGEDSLKVSFEKNYDEIEASIQSSLQNYFKIIQIAKQLYDYNLLKKLIGNSKSISEVMVNVYETHKEDLTLLKKVIINIDKQNGNRKLYEEVFKDKNNNKNYASLVHNNTETNRVSLSDFNAYIGKILDSNKDKIDQKNYNNLKSKVEKKELLQIIANVSTSIIPHQLHYLELETILDNASELYPSIKENKDKFIKLFLFRVPYYFGPLDSRSKNSNVVRKENTTVTPWNIDSIIDYSQTKEKFMKKLTNNCSYLYACSVLPSASLIIEDYQIYNRLNVLTINGALINNELKENLYKYIIGRNKTTVNSLKTYLKNKEGFKGEILFDKIKEDVPFEASSHAILGKAFDLDKDLNLLERCILLATIYIDDKKAFIDEVTLEFPNLTKEQLNCIKNIVPKKWSRLSKELLTELYYVDDNGIAYSILTLLKDTNKNLQMILFDKQYNFMNLIKEKNDEMSGNKSTSDVINEMLEQVPAITRRCINQTMLVVDDIIKAAKKEPSKIMMEVTRNESNDKKEKNSRYKELENFLNSIIKDSKNSDSEYKNQATKLNNELHDEHLVDNLKLKGKHLFLYFKQLGIDMYTGEIINIHDVLNSNKYDTDHIIPQSLIKDDSLDNLVLVSRTINQNVKKDYYPIPQEIKTDKVKSLWTYLFKKKLISEKKYNNLTRTKEISLDEIEQFVNRQINVIDYANITIKNIMEKKYPNTQIIFSKSHYPSFLRKELKIVKNRDVNDAHHAVDAYLNVVCGNILSTKFSNIRKIYELKNNPNREKNTTFNMENVLLFELESKKLFDKIKANCFKHDALVTFKTDYNNGALYKQTMFKASNDESLIPIHTNNEFNDTTKYGGYSSLASSRMTLVTYSKKGKKYKYIITRKSLFDKQNLSESEYLKKILDDVDNPQIICDICLNQKIIYDGGIYLLYTSDSTRNKLKMAYQNYIDNNILYYLDKANKLSADSLKDDTITYDYLNKNGEVILQISKDMNKKIFNTLIETAKKPVYDSCNYIKRIRDLSNFETFNIKSQIEILNNIILTLSRNSEKSKLDNYYKEVGNALLRVSKDVTKNNITLLYESPTGLFVTKRKI

SEQ ID NO: 709 - protein, 1386 aa, synthetic construct
  REGION 1..1386: note = MG44-324 effector
MAKQKILCGLDIGTNSVGWCVTDENNKVIKKQGKSLWGVRMFEEAKDSKERRGFRSSRRRLKRRKERLSLLQSLFSIPMNEVDTSFFYRLSNSFYHNEDREHPFQYTLFNSVNYTDKQYYDEFPTIYHLRKHLLESKEKEDLRFIYLALHHMIKYRGNFLSEGTSFKPLDKESADSDFRALQALIEEESRFDGENISYDDTIFEELKIANKNIKRLGDLQDRFNELLNPLKNGFIKSNIIPLMLGKKIKIKNLKLEDSEEKLELKEICPADENYEDNIQLILASYPEEENLVEILLLLQKIYQFFLLGKLLGDHQYLCNAMVERYEKHHNDLKQLKAYIRKYHNEDYGRLFRKPRKKGEKEEANYSSYVGSYIVNGEEPCRFGRGGKQEEFFKLIKSILAQDNNQEAKDIIQSIDNKDYLPLLNSTSNGIFPYQLNLLEMKVILENQSKYYEFLNERDEDGTIADKIISLLTFKIPYYVGPLSTKASHSWIVRKEGKIYPWNFYRMVKKDDTAKRFIEEMLNRCSYLPSEYCLPKDSLIFTYYNVLSFLNKLQVNGDYLDYEEKMELISLFKAKRKVNVKEIENFFKHKNPGTEVSITTSNGKGLSNIACNMSSYYDFANIYSPEYVDSHTDEIEAIIQDIVIFEDKQILEERLKNTHGIEDISIIKKIKGLNYTKYGRLSKELLVGLKAANQETGELYGSILHIMEHSNMNLQEIIHAEEFNFQALIDDYNQTHSSSDKKDTIEGYVDTLYVNPGMRRGLIQAYKIIEELEKILKRPIDEFYVECARTNKEKKQPSSSRKQKLITLYNEAIKATKDAQELKRLLDHLENMDENQFQSDKFYLYFLQMGRCMYSGDPIEIESLFDTSKYDIDHIIPQSLTKDDSFNNRVLVKQELNRDKKAIYPIESSLLFHGNRDKAFAFYRHLKDMGLMSEDKFEKLRRTQPLKDEEYAAFANRQLVYTNQAVAGLISAIQYFKRDSGHMPRIIYSKAENVSDFRKVFELVKSRTANNFHHAHDAYLNIIVGRTLDSYFSPFKQNKDTIHQMHLENKTTNPLKVFTANYKVFDLSGNLVWDKENSLKEIRHQLYECYDILTTTRTYQGTTLFEKVTIYKKGEGNIGVKASGPLANASEYGGLTGYAFGFYTLIKINKDYILEAIPTLFKNDIKGYLNTLYKEDYEIIVPILNINTVIMEGKKKYCITGKTGNRYFIKNLFERRFNYHLLTIIYKLDKVQNKLSKNKISLKGIETNEELEKYGLYPKKDSLIVSIAKSKDAKQIEISSNECTELYNSLINLLKKEIYNYSPSDIISRLLQEQMNNFVNAPIIFKVKVLNNLLNYLKCNERKNIDLTLLTGKSAMGVLMINKNLRPCKIIAESITGFYTKVIWEIK

SEQ ID NO: 710 - protein, 1336 aa, synthetic construct
  REGION 1..1336: note = MG44-325 effector
MNNNYYIGLDLGTDSLGWATTNEYYDFLRLKGKTAWGARIFSSANDCKQRRTFRSSRRRMQRRKYRIFLLNQLLCEDISKVDSTFFARLQNSHMVWDDKKKLNLSRNLIFKDKNEEKSFYKKYPTIWHLRNALINKDINALSDIRYVYLALHHIIKYRGNFLKEGKLNIQEFNLSLFSDLNDIMKEYIEEKNEIDVDFDVISNDSYQEIINIIEDDKTNKTEKKKKLKELFNCSYSKEIIECFITLSVGGEYDISKLSGEDSLKVSFEKNYDEIEASIQSSLQNYFKILQIAKQLYDYNLLKKLIGNSKSISEVMVNVYETHKEDLTLLKKVINNIDKQNGNRKLYEEVFKDKNNNKNYASLVHNNTETNRVSLSDFNAYIGKILDSNKDKIDQKDYNNLKSKVEKKELLQIIANVSTSIIPHQLHYLELETILDNASELYPSIKENKDKFIKLFLFRVPYYFGPLDSRSKNSNVVRKENTIVTPWNIDSIIDYSQTKEKFMKKLTNNCSYLYACSVLPSASLIIEDYQIYNRLNVLTINGALINNELKENLYKYIIGRNKTTVNSLKTYLKNKEGFKGEILFDKIKEDVPFEASSHAILGKAFDLDKNLNLLERCILLATIYIDDKKAFIDEVNLEFPSLTKEQLNCIKNIVPKKWSRLSKELLTELYYVDDNGIAYSILTLLKDTNKNLQMILFDKQYNFMDLIKEKNDEMSGNKSTSDVINEMLEQVPAITRRCINQTMLVVDDIIKAAKKEPSKIMMEVTRNEGNDKKEKNSRYKELENFLNSIIKDSKNSDSEYKNQATKLNNELHDEHLVDNLKLKGKHLFIYFKQLGIDMYTGEIINIHDVLNSNKYDTDHIIPQSLIKDDSLDNLVLVSRTINQNVKKDYYPIPQEIKTDKVKSLWTYLFKKKLISEKKYNNLTRTKEISLDEIEQFVNRQINVIDYANITIKNIMEKKYPNTQIIFSKSHYPSFLRKELKIVKNRDVNDAHHAVDAYLNVVCGNILSTKFNNIRKIYELKNNPNREKNTTFNMENVLLFELESKKLFDKIKANCFKHDALVTFKTDYNNGALYKQTMFKASNDESLIPIHTNNEFNDTTKYGGYSSLASSRMTLVTYSKKGKKYKCIITRKSLFDKQNLSESEYLNKILGDVDNPQIICDICLNQKVIYDGCIYLLYTSNENQNKLKMAYQNYIDNNILYYLDKANKLSADSLKDDTITYDYLNKNGEVILQISKDMNKKIFNTLIETANKPVYDSCNYIKRIRDLSNFETFSIKSQIEILNNIILTLSRNSEKSKLDNYYKEVGNALLRVSKDVTKNNITLLYESPTGLFVTKRKI

SEQ ID NO: 711 - protein, 1378 aa, synthetic construct
  REGION 1..1378: note = MG44-326 effector
MEKKYYIGLDLGTSSVGWAATDENYNFLRLKGKTAWGARIFSEAVDCKGRRSFRSSKRRVARRKYRLLLLKNLFAEEMAKVDKTFFLRLENSTYWAEDKAKDDKGNDLGKTLIFKTTEEEREFHKAYPTTWHLRKKLVDNDEQALSDLRLVYLAIHHIMKYRGNFLSDGTKDNEEPSKDTIDRINVILNLLEAKDNESGISDNITYLSKESYNELIETLEDKNLNKTKKQDKIKKLFKNVDKTNEDIKVYIDLFKTLVTGGVFSVKKINEEYDKLKIDFNNGFDDNADEISKALGDAYELVLIAKAYNDYISLKDLLGGKPYLSYVMADIYDEHKKDLKSLKKILVSIDYKHGNEGNNRVYNLVFKPVIVPKEERKDKDGKKNKKLTTPNYASFIQGDDVEKKSVTLENLNKNIKEILEANKQYVDEIDKEEFDRLLDKASNNELFKKQATVSTSLIPHQCHLKELKIILENAGKKYPFIKENSDKIIQLFKFRVPYYYGPLNNESKEHAWIVKNEGKERTKITPWNIDEVVNKEKTREGFFKKLTNSCTYLVGETVLPKVSLVYEKYLALERLNKMQVNGNYLNHKDKIDLLNYVLGNSNTTIENIRKKLASDTGMKINDIVISNIKNNVPFTATSHAFFRKHFNLENSEEFELCEEVIKYATIYADDKKELKKFLSENFSFDEKLIKEIANLQTNKWGRLSKKFLCGGAKDEMYYTDENGVMYTILGLLEETNQNLQEIVNSGKYGFDEKIKEFNDALTKDETIDEQISKILEGTPALMVRSITQTIKVVDDVIKAAKCEPKKIIMEVTRTDEKKGQEVASRYIQLKKKISEDKGIDDKEREELLSDLEEANKTKKLKGKHLYLYFSQLGIDLYTGKKMKIEEVLEGKYDIDHIVPQSLIKDDSLDNQVLVNKKYNQDVKKDIYPICDEIRSKMLNLWYNYKERGIIKEEKYNRLIRTTELTDDEINDFVKRQINVVNYSNVQIKRIFELKYPNTEIIFSKAGFPSLLRKEYEIAKMRDLNDAHHAVDAYLNIVCGDILTSLYTDVFYLIKRKKEKKENPTFNMERRLLGYIKKNDLMDKIKSNCLRHDALITFKPDYDSGMFYKQTIFKKSGDKETGLIPLHTKGPMSDVKKYGGYSSLSQSYLLAVEYKVKKKTIKKLLRVPTMYVKLYGDDLNTIAKLMIDDEMATDIKVLRKIYLNQKIKYNGCYYLIYTNNEFVNKYKMAYQNYIDNDALVYLNKCLKKTDELDDKDKTEQEIIVNKDGDKLKITKEENLKIFKLIKEQYSKPIYESTPYIAKSKEMPEDAFNNLSIKKQIDTLFNMIKILSRSNEDAKFDKSLNNGSSKCFLKVNTITDDKIYIVNESPSGLFKGKEELI

SEQ ID NO: 712 - protein, 1378 aa, synthetic construct
  REGION 1..1378: note = MG44-327 effector
MEKKYYIGLDLGTSSVGWAATDENYNFLRLKGKTAWGARIFSEAVDCKGRRSFRSSKRRVARRKYRLLLLKNLFAEEMAKVDKTFFLRLENSTYWAEDKAKDDKGNDLGKTLIFKTTEEEREFHKAYPTTWHLRKKLVDNDEQALSDLRLVYLAIHHIMKYRGNFLSDGTKDNEEPSKDTIDRINVILNLLEAKDNESGISDNITYLSKESYNELIETLEDKNLNKTKKQDKIKKLFKNVDKTNEDIKVYIDLFKTLVTGGVFSVKKINEEYDKLKIDFNNGFDDNADEISKALGDAYELVLIAKAYNDYISLKDLLGGKPYLSYVMADIYDEHKKDLKSLKKILVSIDYKHGNEGNNRVYNLVFKPVIVPKEERKDKDGKKNKKLTTPNYASFIQGDDVEKKSVTLENLNKNIKEILEANKQYVDEIDKEEFDRLLDKASNNELFKKQATVSTSLIPHQCHLKELKIILENAGKKYPFIKENSDKIIQLFKFRVPYYYGPLNNESKEHAWIVKNEGKERTKITPWNIDEVVNKEKTREGFFKKLTNSCTYLVGETVLPKVSLVYEKYLALERLNKMQVNGNYLNHKDKIDLLNYVLGNSNTTIENIRKKLASDTGMKINDIVISNIKNNVPFTATSHAFFRKHFNLENSEEFELCEEVIKYATIYADDKKELKKFLSENFSFDEKLIKEIANLQTNKWGRLSKKFLCGGAKDEMYYTDENGVMYTILGLLEETNQNLQEIVNSGKYGFDEKIKEFNDALTKDETIDEQISKILEGTPALMVRSITQTIKVVDDVIKAAKCEPKKIIMEVTRTDEKKGQEVASRYIQLKKKISEDKGIDDKEREELLSDLEEANKTKKLKGKHLYLYFSQLGIDLYTGKKMKIEEVLEGKYDIDHIVPQSLIKDDSLDNQVLVNKKYNQDVKKDIYPICDEIRSKMLNLWYNYKERGIIKEEKYNRLIRTTELTDDEINDFVKRQINVVNYSNVQIKRIFELKYPNTEIIFSKAGFPSLLRKEYEIAKMRDLNDAHHAVDAYLNIVCGDILTSLYTDVFYLIKRKKEKKENPTFNMERRLLGYIKKNDLMNKIKSNCLRHDALITFKPDYDSGMFYKQTIFKKSGDKETGLIPLHTKGPMSDVKKYGGYSSLSQSYILAVEYKVKKKTVKKLLRIPTMYIKLYGEDLNTIAKLMIDDVKAINIKILRKICLNQKVRFNNCYYLIYTSDDTRCKLKMAYQNYIDNDALVYLNKCLKKIDELDDKDKTEQEIIVNKDGDKLKITKEENLKIFKLIKEQYSKSIYNSITYIVKSRDILEDSFNNLSIKKQIDTLFNMIKILSRSNEDAKFDESLKNGGIKYYRISMNIDNNQIYIVNESPSGLFKGKEELI

SEQ ID NO: 713 - protein, 1391 aa, synthetic construct
  REGION 1..1391: note = MG44-328 effector
MKNTEVTFKKLRLGLDIGTNSVGYALLDDNNKLIKKNGHTFWGVRMFDEAKTAKDRGGFRKSRRRLLRRKERMDILRSFFTKEICSIDPSFFERLDDSFYYFEDKKNNNTYNLFTSEYTDKNFYAEYPTIYHLRQAMQDEDRKFDIRMLYLAVAHIVKYRGNFLYPGEEFSSSDYSSVKQFFLDFNDILDEISNELVDDEDYSARYFEKIENIDDDFLGKLKTTIVHTKGISNKKKALLDLFKVDKKSIYNELVIPFLSGSEKVNISSLSVIKNNKYPKVEIKIASEELESKIEDGISTAPEIKAIIEMITRIKDVTDFFFVNKILSSSNTISNSMIRIYDEHQNDLNRLKLLFKKYDSAHYNDIFRIRDKDVANYVAYVGFNDVNCKVKRFKHASREEFYKYLEKCLKNIKSNEAQAEIKYFIDKMENNELLLKQNSNQNGAFPMQLHLKELKTILNNQAKYYPFLNEVNDGYSIKDKIILTFKYKVPYYVGPLNKESKYSWVIRDDEKIYPWNFDKVVKLDETAEKFILRMQNKCTYLRGENDYCLPKNSLIFSEYTCLSYLNKIQINGRPIDPIMKLKIFSDVFLTKKQPTKKDIISFIKTNYNSDALTTTDKELPELTCNMASYIRMKEIFGDEFSENKEMIENIIKDITIFEDKTILANRLKEVYKLSNEKIKQIKSLNYKGYGRLSKNLLVGLQIIDNHTGEVKGNVIEIMRKTNLILQEILYLDGYRLIDVIDQYNKDNNSSNEDMSVEDYIDDNLVISPSFKRSLIQSYTIIKEIEHIFHKKIDEYYVEVTRTNKDKTKGKATNSRYEKIKNIYKSCDELAMAYNIDMDKLKNELEINKDKLKSDMLYFYFTQLGKCMYSLEDIDISDLNNNYHYDIDHIYPQSIIKDDSLSNRVLVDKKKNAAKMDKFLFETQIQNPNAFQFYKKLLSLELISKEKYRRLTQKEMEKEELDGFVNRQLVSTNQSVMGLIKLLKEYHRVDDNNIIYSKGENISDFRHTFDLVKSRTANNFHHAHDAYLNVVVGGILNKYYTSRRFYQFSDVSRIENEGESLNPARIFTRNIVKVNEKIIWNKTDDIARINKDLYQRFDITETIRTFNPNEMYSKVTVKPKEESENAVPFQTTTPRADVKKYGGITSNKFSRYVIIEAHSKKGVETILEAIPKTACGNDARIKEDIDKYIASLDEYKKYKSYKIVNYNIKANVLIQEGNTKYIITGKSGNSYVTQNVQDRFFSKKAMRIIRNIDKYLNNVKLGISMLKDDKKIIISPARGENNNDVFLKKEELVTLLKEIKTMYSKEIYSFSAITNIVNNINLSINLSIDDLVTLCNNLLQLLKTNERKNVDLKLINLSINSGTLILGKKLKPGIKFIWQSITGYYEKVLYEVK

SEQ ID NO: 714 - protein, 528 aa, synthetic construct
  REGION 1..528: note = MG44-329 effector
QLGRCMYTGARIDLENLNTDTYDVDHILPRTYIKDDSLDNKVLVLRTKNAQKSDTYPLPAGFVGKAQYDFWKMLLSKELISRTTYDRLTRTKPLSDDDYKDFISRQKVITDQTAKAVIELLKQKYPDTEVVFSKAKNVSDFKNKFDLFKCRETNDLHHARDAYLNIVVGNVYNTVFSTPMEMFYKDGDKWRTYNLKKMFTQDVKGAWNKDAGIDTVKRTFARHSMMVTRYATCNKGRFYDETVYDKNDSGVSAPRKGKGPLADYKKYGGYKSQKTAYFAIVEAEGKKGKKIKTIEAVPVLTSYRVKSDPDAVQKYLATYLKNPVVLIPKIKTKQLVSYNGTYIYITGSLGIKDGRITANNANQLFTDNKTDEYVNALLKLIEMEAKKAVEPNEDLYIIKTNREGEIKLVVNKENNIKLYKELKDKLDDKKDNKDKKNNKIYSGLTIFKTFKGYLDNGEESFISLSTLEQSKVLLQILKFLNCKGEAADISAIGGGKKCEIKFSKDITDVDFKIIDLSPAGLTERIRRV

SEQ ID NO: 715 - protein, 1180 aa, synthetic construct
  REGION 1..1180: note = MG44-330 effector
MMIFSKGLKKTLMETKGIANKKKELLDLFNVSKKSIYNELVIPFISGSAKVNISNLSVIKNSKYPKTEISLGSEELEGQVEEAISVAPEIKSVLEMIIRIKEISDFYFINKILSNSKTISESMVKMYKEHNEDLKKLKEFFKKYSEDQYNEIFKIRDEKLANYVAYVGFNKLRKNKVERFKHASREEFYGYLKQKLNNIKDTKAQEEIKYFIDKMDNNEFLLKQNSNQNGAFPMQLHLKELKNILNNQEKYYPFLKEIKDGYSVKQKIILTFKYKIPYYVGPLNKESKYSWVVREDEKIYPWNFDKVVKLDETAEKFILRMQNKCTYLKGDNDYCLPKNSLIFSEYSCLSYLNKISINGKSIDPIMKSKIFNEVFLTKKQPTKKDIIEFIKANYNADALTTTEKELPEVTCNMASYIKMKEIFGKNFNDNKEMIENIIKDITIFEDKSILGNRLKEVYKLNNDRIKQIKGLNYKGYGRLSKNLLVGLQIVDNQTGEIKGNVIEVMRKTNLNLQEILYLDGYRLIDAIDEYNRKNSLNDSYLCARDYIAENLVISPSFKRALIQTCSIIQEIERIFHKKIDEYYVEVTRTNKDKNKGKTTSSRYDKIKKIYSSCEELAMAYNIDMKRLKNELESNKDNLKSDILYFYFTQLGKCMYSLEDIDISDLTNNYHYDIDHIYPQSIIKDDSLSNRVLVYKKKNAAKTDKFLFEANVLNPKAQQFYKKLLSLELISKEKYRRLIQKEMSKDELDGFVNRQLVSTNQSVMGLIKLLKEYYEVDEKNIIYSKGENVSDFRHTFGLVKSRTANNFHHAHDAYLNVVVGGILNKYYTSRRFYQFSDIARIENEGESLNPSKIFTKRDILKANGKIIWDKKEDIRRIEKDLYHRFDITETIRTYNPNEMYSKVTILPKEKGENAVPFQITTPRVDVKKYGGIISNKFSRYVIIEAQSKKGIDTILEAIPKTACGDNNKIEKDIDKYIASLDEYQKYTSYKVVNYNIKANVVIQDGSLKYIITGKSGNQYVLQNIQDRFFSKKAMITIKNIDKYLNNKKLGILMAKDNEKIIVSPARGKNNEEIFLEKTELVNLLKEIKTMYSKDIYSFSIIQNIVNNIDCSIEYSIEDFITICNNLLQILKTNERKNADLRLIHLSGNSGTILISKKLKSGMKFIWQSITGYYEEILYEVK

SEQ ID NO: 716 - protein, 613 aa, synthetic construct
  REGION 1..613: note = MG44-331 effector
EEDIATMRVSPALKRGIWQSLQLVDEYVAALGGTPDKIFVEVTREDGVKGNDGRTVSRKKQLLEKYKGVENIDELVAELQSDDVSDMRLRQEKLYLYFRQLGKCMYTGKRIDLSQLNTDLYDVDHILPRTYIKDDSLDNKVLVLRSKNAEKSDAYPLPQGFSNQAPFWKLLLDKGLIGEKTYKRLTRTAPLTDDDYNDFINRQKTITDQTAKAVVELLKRKYPQAKVVFSKAKNVSDFKQKFDLHKCRETNDLHHARDAYLNIVVGNVYDACFTTPMAQFRKDGDVWRTYNLKTMFTRNVKGAWDENSLATVKKTYSKCSMSVTEYTYCGKGAFYNQTVYGAGDTSVTAPRKANGPLANTARYGGYKSQNTAYFVIVDSLGKKGTQRTIEAIPVMVAYRATTDTNAVYDYLTNTLQLRDVKVVVPKVKKKQLVSYNGSLVRLTGITGNSVTASNACQLFTNNKIDEYVNQLLKLLEMDKNGRVDKTASEYVMKTNRMGDIKLVVDKAHNEKLYDCFVEKLQSGKYGNLSSFVTFGKNLQNGQEKFANLTTLEQAYVIVQILRFFKCDAQTADIKLVGGSAASGRIYLNGNITDVDFQLIDQSPCGLTVRTRKL

SEQ ID NO: 717 - protein, 1378 aa, synthetic construct
  REGION 1..1378: note = MG44-332 effector
MEKKYYIGLDLGTSSVGWAATDENYNFLRLKGKTAWGARIFSEAVDCKGRRSFRSSKRRVARRKYRLLLLKNLFAEEMAKVDKTFFLRLENSTYWVEDKAKDDKGNDLGKTLIFKTTEEEREFHKAYPTTWHLRKKLVDNDEQALSDLRLVYLAIHHIMKYRGNFLSDGTKDNEEPSKDTIDRINVILNLLEAKDNESGISDNITYLSKESYNELIETLEDKNLNKTKKQDKIKKLFKNVDKTNEDIKVYIDLFKTLVTGGVFSVKKINEEYDKLKIDFNNGFDDNADEISKALGDAYELVLIAKAYNDYISLKDLLGGNPYLSYVMADIYDEHKKDLRSLKEILISIDNKLGNEGNNRIYNLVFKPVIVPKEERKDKDGKKNKKLTTPNYASFIQGDDVEKKSVTLENLNKNIKEILEANKQYVDEIDKEEFDRLLDKASNNELFKKQATVSTSLIPHQCHLKELNKILENAGEKYPFIKENSDKIIQLFKFRVPYYYGPLNNESKEHAWIVKNEGKERTKITPWNIDEVVNKEKTREGFFKKLTNSCTYLVGETVLPKVSLVYEKYLALERLNKMQVNGNYLNHSDKMDLLNYVLGNSNTTIENIRKKLASDTGMKINDIVISNIKNNVPFTATSHAFFRKRFNLENSKEFELCEEVIKYATIYADDKKELKKFLSENFSFDEKLIKEIANLQTNKWGRLSKKFLCGGAKDEMYYTDENGVMYTILDLLEETNQNLQEIVNSGKYGFDEKIKEFNDALTKDETIDEQISKILEGTPALMVRSITQTIKVVDDVIKAAKCEPKKIIMEVTRTDEKKGQEVASRYIQLKKKISEDKGIDDKEREELLSDLEEANKTKKLKGKHLYLYFSQLGIDLYTGKKMKIEEVLEGKYDIDHIVPQSLIKDDSLDNQVLVNKKYNQDVKKDIYPICDEIRSKMLNLWYNYKERGIIKEEKYNRLIRTTELTDDEINDFVKRQINVVNYSNVQIKRIFELKYPDTEIIFSKAGFPSLLRKEYEIAKMRDLNDAHHAVDAYLNIVCGDILTSLYTDVFYLIKRKKEKKENPTFNMERRLLGYIKKNDLMNKIKSNCLRHDALITFKPDYDSGMFYKQTIFKKSGDKETGLIPLHTKGPMSDVKKYGGYSSLSQSYILAVEYKVKKKTVKKLLRIPTMYIKLYGEDLNTIAKLMIDDEKAINIKILRKICLNQKVRFNNCYYLIYTSDDTRCKLKMAYQNYIDNDALVYLNKCLKKIDELDDKDKTEQEIIVNKDGDKLKITKEENLKIFKLIKEQYSKSIYNSITYIVKSRDILEDSFNNLSIKKQIDTLFNMIKILSRSNEDAKFDESLKNGGIKYYRISMNIDNNQIYIVNESPSGLFKGKEELI

SEQ ID NO: 718 - protein, 1355 aa, synthetic construct
  REGION 1..1355: note = MG44-333 effector
MSEKLFVGLDIGTNSVGWAVTDEEYNLKRLKGKTAWGSRIFQEAKSKKETRNIREKRRRMNRRKYRLTLLQNLFIEEIKKIDSTFFIRLDNASYLAEDKVNKGIGKNLIFKDKQDEIKFYKTYPTIWHLRKALINGEDNALSNLKYIYLAIHHIIKYRGHFLFDGDLSYQQLDEKLIIDLNEYLKGKCDSFSFVNNETDFISSEKTNDLKNILLDKNKNKISKQKSIKELFDAHDDEKIQARIQMFSVIVTGSSYKLSKLNKSYESSICFDSNYEDSIDKIKLELQDDFYLVDIAKRIFDFISLNELLKNNDYLSYAMVKVYEKHKEDLKKLKKIILNIDKNNHERKSRLYDNLFKKDFDNNYAELVNVGTSIKKRIKLEDFNKLICKILEENSQYIHDQDKKDYDYLLKQAKENELLKIIAHVSTSRIPHQLHLNELKIIIENASIYHPFLKEIKEKLILLFQYKIPYTYGPLNSNSPFSNIVRIRNEKATPWNIHELIDENKTREKFMNKLTNNCSYLYGEKVLPKSSLTFETFLILEKLNVMMVNGDYLSFSEKEEVYQYIISNGKDKTTLTQIRSFLASKSNTSIHNILLSNIKEDSLFEARSHTHLSKFFNLKQNPKQIEYYIYLATVYADDKNGLKKILEKEHSELTKEQIKCLLTLPTNKWAPLSYKLLNEIYYIDYDTGIALSILQAMKEKNCNFQMLLYHPIYHFNKLIEDYNASVKGDISSDEMIDEILQNVPSISQRSIHQALLVLNDISKASSQNINKIFIEVTRKDDEEKKKKETDSREKEIYNFIQQLSKEVQNTLITSFNVETLQEEFKLLEKTKLKSKHIYLYFKQMGLDMYTGEKISLDDLLKHDNYDIDHIIPQSLIKDDSLDNLVLVSKNINQKVKGDSYPLPIQLQNEKTKKLWKYLLKMKAISDNKYANLMRTSKISLEEIERFVNRQINIINYTNIALRDILKLKYPQSEIIFSKAHYPSFIRNYLQIIKNRNVNDTHHAIDAYLNVFCGNTLSKSFYNIKKIYDEKVIEGQTKTFNMEKILEYELDKKDSQNISLMDKIKSNCLRHDIIVTFKCDYNNGAFYKETIWPHDEKTLIPIHTKNDNPMNNPYKYGGYKDLAQAYLLAVQYENKNKIEKYILRVPLLLDKKYGNDLNELVKYLIKKENAKNIKILRKIYLNQKIKYEKGIYLIYTSNEITNKYKMAFQNYIDNQDLAYLQKTQNKYNEINIDLPSQEFVLNRKGEIFVVSKKINLEIFDKLIQSAKKEVYNTCNYIVAMRDLDRAIFESIDLKKQLNTLNTMINCLSRNNELCKFEKEFTNMPKTFKFLPTMNITDKSITIIYESPTGLFSHEVKI

SEQ ID NO: 719 - protein, 700 aa, synthetic construct
  REGION 1..700: note = MG44-334 effector
ENFSFDEKLIKEIANLQTNKWGRLSKKFLCGGAKDEMYYTDENGVMYTILDLLEETNQNLQEIVNSGKYGFDEKIKEFNDALTKDETIDEQISKILEGTPALMVRSITQTIKVVDDVIKAAKCEPKKIIMEVTRTDEKKGQEVASRYIQLKKKISEDKGIDDKEREELLSDLEEANKTKKLKGKHLYLYFSQLGIDLYTGKKMKIEEVLEGKYDIDHIVPQSLIKDDSLDNQVLVNKKYNQDVKKDIYPICDEIRSKMLNLWYNYKERGIIKEEKYNRLIRTTELTDDEINDFVKRQINVVNYSNVQIKRIFELKYPDTEIIFSKAGFPSLLRKEYEIAKMRDLNDAHHAVDAYLNIVCGDILTSLYTDVFYLIKRKKEKKENPTFNMERRLLGYIKKNDLMNKIKSNCLRHDALITFKPDYDSGMFYKQTIFKKSGDKETGLIPLHTKGPMSDVIKYGGYSSLSQSYILAVEYKVKKKTVKKLLRIPTMYIKLYGEDLNTIAKLMIDDEKAINIKILRKICLNQKVRFNNCYYLIYTSDDTRCKLKMAYQNYIDNDALVYLNKCLKKIDELDDKDKTEQEIIVNKDGDKLKITKEENLKIFKLIKEQYSKSIYNSITYIVKSRDILEDSFNNLSIKKQIDTLFNMIKILSRSNEDAKFDESLKNGGIKYYRISMNIDNNQIYIVNESPSGLFKGKEELI

SEQ ID NO: 720 - protein, 794 aa, synthetic construct
  REGION 1..794: note = MG44-335 effector
MLNIWRRNIILGLDLGTSSVGWAATDENYNFLRIKGKTAWGARIFSEAVDCKGRRSFRSSKRRVARRKYRLLLLKNLFAEEMAKVDKTFFLRLENSTYWAEDKAKDSEGNDLGKTLIFKTTEEEREFHKAYPTTWHLRKKLVDNDEQALSDLRLVYLAIHHIMKYRGNFLSDGTKDNEEPSKDTIDRINVILNLLEAKDNESGVSDNITYLSKESYNELIETLEDKNLNKTKKQDKIKKLFKNVDKTNEDIKVYIDLFKTLVTGGVFSVKKINEEYDKLKIDFNNGFDDNADEISKALGDAYELVLIAKAYNDYISLKDLLGGKPYLSYVMADIYDEHKKDLRSLKEILISIDNKLGNEGSNRVYNLVFKPVIVSKEERKDKDGKKNKKLTTPNYASFIQGDDVEKKSVTLENLNKNIKEILEANKQYVDEIDKEEFDRLLDKASNNELFKKQATVSTSLIPHQCHLKELNKILENAGKKYPFIKENSDKIIQLFKFRVPYYYGPLNNESKEHAWIVKNEGKERTKITPWNIDEVVDKGRTREGFFKKLTNSCTYLVGETVLPKVSLVYEKYLALERLNKMQVNGNYLNHSDKMDLLNYVLGNSNTTIENIRKKLASDTGMKINDIVISNIKNNVPFTATSHAFFRKHFNLENSEEFELCEEVIKYATIYADDKKELKKFLSENFSFDEKLIKEIANLQTNKWGRLSKKFLCGGAKDEMYYTDENGVMYTILGLLEETNQNLQEIVNSGKYGFDEKIKEFNDALTKDETIDEQISKILEGTPALMVRSITKLWK

SEQ ID NO: 721 - protein, 590 aa, synthetic construct
  REGION 1..590: note = MG44-336 effector
MKVVDDVIKAAKCEPKKIIMEVTRTDEKKGQEVASRYIQLKKKISEDKGIDDKEREELLSDLEEANKTKKLKGKHLYLYFSQLGIDLYTGKKMKIEEVLEGKYDIDHIVPQSLIKDDSLDNQVLVNKKYNQDVKKDIYPICDEIRSKMLNLWYNYKERGIIKEEKYNRLIRTTDLTDDEINDFIKRQINVVNYSNIQIKRIFELKYPDTEIIFSKAGFPSLLRKEYEIAKMRDLNDAHHAVDAYLNIVCGDILTSLYTDVFYLIKMKKEKKENPTFNMERRLLGYIKKNDLMNKIKSNCLRHDALITFKPDYDSGMFYKQTIFKKSGDKETGLIPLHTKGPMSNVKKYGGYSSLSQSYLLAVEYKVKKKTIKKLLRVPTMYVKLYGDDLNTIAKLMIDDEMATDIKVLRKIYLNQKIKYNGCYYLIYTNNEFVNKYKMAYQNYIDNDALVYLNKCLKKTDELDDKDKTEQEIIVNKDGDKLKITKEENLKIFKLIKEQYSKPIYESTPYIAKSKEMPEDAFNNLSIKKQIDTLFNMIKILSRSNEDAKFDKSLNNGSSKCFLKVNTITYDKIYIVNESPSGLFKGKEELI

SEQ ID NO: 722 - protein, 1378 aa, synthetic construct
  REGION 1..1378: note = MG44-337 effector
MEKKYYIGLDLGTSSVGWAATDENYNFLRLKGKTAWGARIFSEAVDCKGRRSFRSSKRRVARRKYRLLLLKNLFAEEMAKVDKTFFLRLENSTYWVEDKAKDDKGNDLGKTLIFKTTEEEREFHKAYPTTWHLRKKLVDNDEQALSDLRLVYLAIHHIMKYRGNFLSDGTKDNEEPSKDTIDRINVILNLLEAKDNESGISDNITYLSKESYNELIETLEDKNLNKTKKQDKIKKLFKNVDKTNEDIKVYIDLFKTLVTGGVFSVKKINEEYDKLKIDFNNGFDDNADEISKALGDAYELVLIAKAYNDYISLKDLLGGNPYLSYVMADIYDEHKKDLRSLKEILISIDNKLGNEGNNRIYNLVFKPVIVPKEERKDKDGKKNKKLTTPNYASFIQGDDVEKKSVTLENLNKNIKEILEANKQYVDEIDKEEFDRLLDKASNNELFKKQATVSTSLIPHQCHLKELNKILENAGEKYPFIKENSDKIIQLFKFRVPYYYGPLNNESKEHAWIVKNEGKERTKITPWNIDEVVNKEKTREGFFKKLTNSCTYLVGETVLPKVSLVYEKYLALERLNKMQVNGNYLNHSDKMDLLNYVLGNSNTTIENIRKKLASDTGMKINDIVISNIKNNVPFTATSHAFFRKRFNLENSKEFELCEEVIKYATIYADDKKELKKFLSENFSFDEKLIKEIANLQTNKWGRLSKKFLCGGAKDEMYYTDENGVMYTILDLLEETNQNLQEIVNSGKYGFDEKIKEFNDALTKDETIDEQISKILEGTPALMVRSITQTIKVVDDVIKAAKCEPKKIIMEVTRTDEKKGQEVASRYIQLKKKISEDKGIDDKEREELLSDLEEANKTKKLKGKHLYLYFSQLGIDLYTGKKMKIEEVLEGKYDIDHIVPQSLIKDDSLDNQVLVNKKYNQDVKKDIYPICDEIRSKMLNLWYNYKERGIIKEEKYNRLIRTTELTDDEINDFVKRQINVVNYSNVQIKRIFELKYPDTEIIFSKAGFPSLLRKEYEIAKMRDLNDAHHAVDAYLNIVCGDILTSLYTDVFYLIKRKKEKKENPTFNMERRLLGYIKKNDLMNKIKSNCLRHDALITFKPDYDSGMFYKQTIFKKSGDKETGLIPLHTKGPMSDVKKYGGYSSLSQSYILAVEYKVKKKTVKKLLRIPTMYIKLYGEDLNTIAKLMIDDEKAINIKILRKICLNQKVRFNNCYYLIYTSDDIRCKLKMVYQNYIDNDALVYLNKCLKKIDELDDKDKTEQEIIVNKDGDKLKITKEENLKIFKLIKEQYSKSIYNSITYIVKSRDILEDSFNNLSIKKQIDTLFNMIKILSRSNEDAKFDESLKNGGIKYYRISMNIDNNQIYIVNESPSGLFKGKEELI

SEQ ID NO: 723 - protein, 1393 aa, synthetic construct
  REGION 1..1393: note = MG44-338 effector
MKNNEETLKKLRLGLDIGTNSVGYALLDENNKLIKKNGHTFWGVRMFDEAETAKDRGSYRKSRRRLLRRKERMEILRSFFTKEICDIDPTFFERLDDSFYYKEDKKNKNTYNLFTSEYTDKDFYLEYPTIYHLRKAMQEEDKKFDIRMVYLAIAHIIKYRGNFLYPGEEFSTSEYTSIKQFFLDFNDILDELSNELEDNEDYSAEYFDKIENINDDFLEKLKVILMEIKGISNKKKELLDLFNVNKKSIYNELVIPFISGSAKVNISSLSVIKNSKYPKTEISLGSEELEGQVEEAISVAPEIKSVLEMIIKIKEISDFYFINKILSDSKTISESMVKMYDEHNEDLKKLKGFFKKYAEDQYNEIFKIRDEKLANYVAYVGFNKLRKNKVERFKHASREEFYGYLKQKLNNIKYAEAQEEIKYFIDKIDNNEFLLKQNSNQNGAFPMQLHLKELKTILNNQEKYYPFLSEGNDGYSIKEKIILTFKYKIPYYVGPLNKESKYSWVVREDEKIYPWNFDKVVKLDETAEKFILRMQNKCTYLKGDNDYCLPKNSLIFSEYSCLSYLNKLSINGKPIDPIMKSKIFNEVFLIKKQPTKKDIIEFIKTNYNADALTTTEKELPEATCNMASYIKMKEIFGKDFNDNKEMIENIIKDITIFEDKSILGNRLKELYKLNNDRIKQIKGLNYKGYSRLSKNLLVGLQIVDNQTGEIKGNVIEVMRKTNLNLQEILYLDGYRLIDAIDEYNRKNSLNDSYLCARDYIAENLVISPSFKRALIQTCSIIQEIERIFHKKIDEFYVEVTRTNKDKNKGKTTSSRYDKIKKIYSSCQELAMAYNFDMKRLKNELESNKDNLKSDILYFYFTQLGKCMYSLEDIDIGDLTNNYHYDIDHIYPQSIIKDDSLSNRVLVDKKKNAAKTDKFLFEAKVLNPKAQQFYKKLLSLELISKEKYRRLTQKEISKDELEGFVNRQLVSTNQSVMGLIKLLKEYYKVDEKNIIYSKGENVSDFRHTFDLVKSRTANNFHHAHDAYLNVVVGGILNKYYTSRRFYQFSDIARIENEGESLNPSRIFTKRDILKANGKVIWDKKEDIKRIEKDLYHRFDITETIRTYNPNKMYSKVTILPKGEGESAVPFQTTTPRVDVEKYGGITSNKFSRYVIIEAHGKKGLDTILEAIPKTACGDNNKIEKDIDNYIASLDEYQKYTSYKVVNYNIKANVVIQEGSFKYIITGKSGNQYVLQNVQDRFFSKKAMITIKNIDKYLNNKKLGIIMAKDNEKIIVSPARGKNNEEIFLGKTELVNLLKEIKTMYSKDIYSFSAIQNIVNNIDCSIDYSIDDFIIICNNLLQILKTNERKNADLRLIHLSGNSGTLYLGKKLKSGMKFIWQSITGYYEEILYEVK

SEQ ID NO: 724 - protein, 1378 aa, synthetic construct
  REGION 1..1378: note = MG44-339 effector
MEKKYYIGLDLGTSSVGWAATDENYNFLRLKGKTAWGARIFSEAVDCKGRRSFRSSKRRVARRKYRLLLLKNLFAEEMAKVDKTFFLRLENSTYWAEDKAKDDKGNDLGKTLIFKTTEEEREFHKAYPTTWHLRKKLVDNDEQALSDLRLVYLAIHHIMKYRGNFLSDGTKDNEEPSKDTIDRINVILNLLEAKDNESGISDNITYLSKESYNELIETLEDKNLNKTKKQDKIKKLFKNVDKTNEDIKVYIDLFKTLVTGGVFSVKKINEEYDKLKIDFNNGFDDNADEISKALGDAYELVLIAKAYNDYISLKDLLGGNPYLSYVMADIYDEHKKDLKSLKKILVSIDYNLGNEGNNRIYNLVFKPVIVPKEERKDKDGKKNKKLTTPNYASFIQGDDVEKKSVTLENLNKNIKEILEANKQYVDEIDKEEFDRLLDKASNNELFKKQATVSTSLIPHQCHLKELKIILENAGKKYHFIKENSDKIIQLFKFRVPYYYGPLNNESKEHAWIVKNEGKERTKITPWNIDEVVDKGRTREGFFKKLTNSCTYLVGETVLPKVSLVYEKYLALERLNKMQVNGNYLNHSDKMDLLNYVLGNSNTTIENIRKKLASDTGMKINDIVISNIKNNVPFTATSHAFFRKHFNLENSEEFELCEEVIKYATIYADDKKELKKFLSENFSFDEKLIKEIANLQTNKWGRLSKKFLCGGAKDEMYYTDENGVMYTILDLLEETNQNLQEIVNSGKYGFDEKIKEFNDALTKDETIDEQISKILEGTPALMVRSITQTIKVVDDVIKAAKCEPKKIIMEVTRTDEKKGQEVASRYIQLKKKISEDKGIDDKEREELLSDLEEANKTKKLKGKHLYLYFSQLGIDLYTGKKMKIEEVLEGKYDIDHIVPQSLIKDDSLDNQVLVNKKYNQDVKKDIYPICDEIRSKMLNLWYNYKERGIIKEEKYNRLIRTTELTDDEINDFVKRQINVVNYSNVQIKRIFELKYPDTEIIFSKAGFPSLLRKEYEIAKMRDLNDAHHAVDAYLNIVCGDILTSLYTDVFYLIKRKKEKKENPTFNMERRLLGYIKKNDLMNKIKSNCLRHDALITFKPDYDSGMFYKQTIFKKSGDKETGLIPLHTKGPMSDVKKYGGYSSLSQSYILAVEYKVKKKTVKKLLRIPTMYIKLYGEDLNTIAKLMIDDEKAINIKILRKICLNQKVRFNNCYYLIYTSDDTRCKLKMAYQNYIDNDALVYLNKCLKKIDELDDKDKTEQEIIVNKDGDKLKITKEENLKIFKLIKEQYSKSIYNSITYIVKSRDILEDSFNNLSIKKQIDTLFNMIKILSRSNEDAKFDESLKNGGIKYYRISMNIDNNQIYIVNESPSGLFKGKEELI

SEQ ID NO: 725 - protein, 862 aa, synthetic construct
  REGION 1..862: note = MG44-340 effector
MRFIDTPLYGQQIMIILFILAFILSIFDTIMAIKICKKRWTIFLAIFTLLLSFITIFLTMRGSYLYRVNRQVFEPSFTIIKLPFVFFLILILVLLSVEVFLLVYTTKWKNENLSPFSIKESLDTLPSGIAFYDDNGLVSLINIEMNELSLLITGKALLNGKTFWESVMLNDITNDAKVLKICEEPIIELKNGVIISLKRNIHDIDNKIFYEIIASNITSIYKLTKELEIKLNALELVNKRLITYGENINKLTHEKEVLKAKIRIHDDMGKILLTTKHKLSSCMSLGDRKDLFDFWKIEIDALKNSDKRENKNNLDVIKEAASMVGVKIEYKGEYPSLDTIIEKILVNAMHECLTNIVRHANGKKMKVEEVLEGKYDIDHIVPQSLIKDDSLDNQVLVNKKYNQDVKKDIYPICDEIRSKMLNLWYNYKERGIIKEEKYNRLIRTTELTDDEINDFVKRQINVVNYSNVQIKRIFELKYPDTEIIFSKAGFPSLLRKEYEIAKMRDLNDAHHAVDAYLNIVCGDILTSLYTDVFYLIKRKKEKKENPTFNMERRLLGYIKKNDLMNKIKSNCLRHDALITFKPDYDSGMFYKQTIFKKSGDKETGLIPLHTKGPMSDVIKYGGYSSLSQSYILAVEYKVKKKTVKKLLRIPTMYIKLYGEDLNTIAKLMIDDEKAINIKILRKICLNQKVRFNNCYYLIYTSDDTRCKLKMAYQNYIDNDALVYLNKCLKKIDELDDKDKTEQEIIVNKDGDKLKITKEENLKIFKLIKEQYSKSIYNSITYIVKSRDILEDSFNNLSIKKQIDTLFNMIKILSRSNEDAKFDESLKNGGIKYYRISMNIDNNQIYIVNESPSGLFKGKEELI

SEQ ID NO: 726 - protein, 972 aa, synthetic construct
  REGION 1..972: note = MG44-341 effector
ILEEAVKSNLEAKAGGDYDYIKQACENGEFMPKILHADNGLFPHQVNGEELGKILLSLQNFYPEVTDEFVKKVKTLFAFRVPYYVGPLVGNGDNHWSVRKADGRILPWNFDDKIDLASSNEAFMRRMTNKCAYLRGEDVLPKASVLYQKYDALNQLNKLRVNDKPVSVELKKRIFDELFTKYPRVTDKKIVDFLVKNGYAANGEKPAISGKDGDFKASMSSYINLKKILGDFVDEDYARGGEVCENIILWHTLNTDKNVVEGLIKRNYGNIPAIRANIKQLKGLTFRDFGRLSKKLLTGLEFADKRTGEIGNLLYFLYERNLNLNEFIFSDEYTLKEKIEEANGGYEVADIDELIEESYVSPAVKRGIRQSLTMADEYVEALGRNPDKVFIEVTREDGQKGDKGRTVSRKRQLSEKYKAITSADFEGIDNVAAELGRDDMTDMLLRKKKLYLYFRQLGRCAYCGKYIDLDNLMKSGTPKRYEKDHILPRTYIKDDSIDNMVLVCRECNALKSDTYPLPNDLRQNSLWKLWLNKGLIGRKTYERLARTEPLGDSDYADFENRQKVITDQMAKAVAELMKIKFPNSKIVYSKAKNVSDFRQRFDLFKCRETNDLHHARDAYLNIVVGNVYDVRFSGNFRYKDGDAWREYNLKNLFTRDIRGAWNTATSEETVKKTYGKNSMIVTRLAVCGKGGFYNQTVYGSGDGSITQPRKTIGPLSDPSKYGGYKSENTAYFAIVRSTDKKGKRVTTIEAIPVLTSYREKKDTGAVTEYLTKTRGLADLEIVVPKVKVKQLFRYNGTLLYIAGITGKQITAHNATELFTDNKTDEYVRELAKLSAMRKEKKIDETQERYIMKTNALGEEKLVIDRDRNLAFYNLLVEKLGKDRYKGVSAFGVILGYLSKGKDAFMCLSVVNQVQVLLEILKFLRCTADAADLRLLNGSQQSGKIVFNQDITDVNFELVYRSATGLTERVRKI

SEQ ID NO: 727 - protein, 1334 aa, synthetic construct; identical to SEQ ID NO: 614
  REGION 1..1334: note = MG44-342 effector

SEQ ID NO: 728 - protein, 1339 aa, synthetic construct
  REGION 1..1339: note = MG44-343 effector
MIENNYYIGLDLGTDSLGWAVSNENYDLIRLKGKTAFGARIFSSAEDCKKRRMFRSSRRRLQRRKYRIYLLNQLLAEDINKVDSTFFERLKYSYLVLDDKSKKNISRNLLFKTRQQEVEFYKKYPTIWHLRNALINNNHKLHDDALSDIRNVYLALHHIIKYRGNFLSDGNINLKEMDLSLFDRLNKLFCLYIEDNDNIDVDFDVIQKSDYDKITKILEDKQTNKIQKKKCLKSLFKMDYAKDLIECFYTLIVGGDYDISKITNGESLKISFEKNYDEYEEIIKNELNENFEIIQIAKQIYDHILLKNLIGDKKSISEVMVEVYETHKQDLKLLKDVIIGIDKENGNHDLYKSIFKNEGKNNYSAFVHHNSDNDRITIDDFNVEIGKILDSNKDKIEEKAYQYLKEKTEKKKLLQIIANVSTSLIPHQLHLIELKIILDNAKKIYPTILENEDKIIKLFKFRVPYYFGPLDSRSINSNVDRKSNKTITPWNVEEIIDYSKTKTNFMKKLTSNCSYLYDCKVLPRASLIIEDYQIYDRLNALKINGAQLDLETKNKLYLKIISQNKTTIQSLKNYLKNSEGFKGNVLFDGIKEDVPFEASSHALLRKCFDLEKDFDLLERCIFLATIYADDKKAYFEEVKNEFPTLTKEQYNNLKSITPKKWSRLSKELLTELYYVDENGVTHSILSLMKNTNKNFQQILFDKEYKFNLLIDSKNKEMSGEKTDNEIINNILESVPAITRRCINQTILVLDDIVKASKKEPAKIMIEVTRNEEKDKKEKDSRKKEVENFLNSIIKDSKNEYYKNQASKLVDELNYIENDANKLKGKHLYLYFKQMGCDMYTGEVINIHDVLNSNMYDTDHIIPQSLIKDDSLDNLVLVKRTINQTVKKDLYPIPRDIKTQKVKDLWKYLFSIKAISEKKYNNLIREKEITFEEIEQFVNRQINVIDYANISIKNILEIKYPNTKIIFSKSHYPSFLRKELNIVKNRDLNDAHHAVDAYLNVVCGNILSTRFNDIRKIYELKISGNKDKSTTFNMESVLLCEINKQKLFDKIKNNSFRHDALVTYKVDYNNGALYKQTIYKASNDESLIPIHTGKEFSEFNDTAKYGGYKSLSSSKMSVVTYTEKGKLYKKIISRKIIYDKQINNDEEYLKKILGDVSNPKSICDLYLNQKIEYDGGIYLLYTSNENQNKLKMAYQNYMDNNDLFYLNHANKKVNDFKDDALEYKIKDKNDNLIVTISKQENEIIFNKIKDLLNNKIYDSCNYLKKLRDLDNFSSFNIKDQINIINNLIVAMSRNSEKSKLMSYYKEAGNAKLLITKDITKNNIKIIYESPTGLFVKKKKI

SEQ ID NO: 729 - protein, 1398 aa, synthetic construct
  REGION 1..1398: note = MG44-344 effector
MENKYYVGIDLGTSSVGWAATDENYNFLRLKGKTAWGARLFDGANTCQKRRERRSKRRRMARRKYRLLLLNQLFAEEMAKVDKTFFLRLANSTYWAEDKAKDDKGNDLGKNIIFKTWKEESEFYNNYKTIWHLRNELVKNNDNAFSDLRLVYLAIHHIIKYRGNFLTEGDNFNEKPTVELIRELNSILSKLDEENSNDFLLDDEESIIEDENNKYISEDKLDKLLEILKSDEYKSKKEKQNDIDKLFVKNRSQLIKKYIDMYKVLVTGGSFKISRIDKELGDLEIDFNNGFDENLDEIKSKLGNAIDLVFNAKKIHDYNSLSKLFGDKNANKNLSQIMVDVYDNHKKDLRNLKKVIRSVDVKLDKKGKESLYYSIFRPIKLTKEDNKRDENNKKTKKSQTPNYASFVQGDDINFKYVTLEKLNDNLKEVLEKNKQYIDDEETYIDLHDKAEKGILLQKPANVSTSLIPHQSHLQELKIILKNASDRYPFIKEIEDKIIKLFMFKVPYYYGPLSTSKSHPYAWVETKEEGTKITPWNMYDVVDEEKTRNKFMKRLINSCSYLDGEPVLPKVSLCYEEYLVLDSLNKMMLNGQFLSPSVKESVLKYILSRSKTTIGNIKTFLKKENELYQNELKDDDVSISNIKSDIIFNASSHALLSKYFDLEKDKEMVESLILLATIYAGDSKSLIEAINSNKNYKELTKEQVNAISKLPTNKWGRLSKTFLCGGKDGEMYWVDESIGRCCSILEIMQETNKNLQEVLFDKTYKFQDKINKFNADLRGNKTVKDQIDDIYDEMPSVFVRSVTQTIAVLDDVVRAARCAPNKIYIEVTRADQEKKETKSRYDALKEVIKKELKDEADRRDSLLEKLEYANNSRKLRSINVYLYFLQLGIDFYTGEPIKDLNDVINGIYDKDHIVPQSLRPDDSIDNLVLVNKDYNEKVKRDIYPIVAPIRNEKTLKLWKSYHKRKLISDKKYNSLIRTTELTYEEINDFVNSQINVVNFSNVQLKRILELKYPDTKVCFTKAIYASSLRQKLSIAKMRDLNDSHHAVDAYLNIVGGDILSNLYTDVFYLYDEKKNKKKNVSFDMEKRLHNYIEDNNLKDKIRTNCFRHDALITYKPKFSTSKKAGDLYKETIFKKADKDSVNLIPCHTKGPMKDTKKYGGYSQINQSYILAVEYTSGKKTVKKLLRVPTMYLNLYGNNEEELLKLIVNDEKAKDIKILRKIYINQKIKYNGCYYRIFTKGKNNIYKMAYQNYIDNNIVLYLNKSLKLSDDLIDKTIDSQTFIINNKGEKFIISKEKNKIIFDTIKERMFNKRYDECSYFEKAREMKFEIFNNLSLKEQISTLINMLKLLSCSTESVNINAEFKVEKRLLFVNSPDITKEEIYIVNESPSGLFKGKEELI

SEQ ID NO: 730 - protein, 1378 aa, synthetic construct
  REGION 1..1378: note = MG44-345 effector
MEKKYYIGLDLGTSSVGWAATDENYNFLRLKGKTAWGARIFSEAVDCKGRRSFRSSKRRVARRKYRLLLLKNLFAEEMAKVDKTFFLRLENSTYWAEDKAKDDEGNDLGKTLIFKTTEEEREFHKTYPTTWHLRKKLVDNDEQALSDLRLVYLAIHHIMKYRGNFLSDGTKDNEEPSKDTIDRINVILNLLEAKDNESGVSDNITYLSKESYNELIETLEDKNLNKTKKQDKIKKLFKNVDKTNEDIKVYIDLFKTLVTGGVFSVKKINEEYDKLKIDFNNGFDDNADEISKALGDAYELVLIAKAYNDYISLKDLLGGNPYLSYVMADIYDEHKKDLKSLKKILVSIDYNLGNEGNNRIYNLVFKPVIVPKEERKDKDGKKNKKLTTPNYASFIQGDDVEKKSVTLENLNKNIKEILEANKQYVDEIDKEEFDRLLDKASNNELFKKQATVSTSLIPHQCHLKELKIILENAGKKYQFIKENSDKIIQLFKFRVPYYYGPLNNESKEHAWIVKNEGKERTKITPWNIDEVVDKGRTREGFFKKLTNSCTYLVGETVLPKVSLVYEKYLALERLNKMQVNGNYLNHKDKIDLLNYVLGNSNTTIENIRKKLASDTGMKINDIVISNIKNNVPFTATSHAFFRKHFNLENSEEFELCEEVIKYATIYADDKKELKKFLSENFSFDEKLIKEIANLQTNKWGRLSKKFLCGGAKDEMYYTDENGVMYTILGLLEETNQNLQEIVNSGKYGFDEKIKEFNDALTKDETIDEQISKILEGTPALMVRSITQTMKVVDDVIKAAKCEPKKIIMEVTRTDEKKGQEVASRYIQLKKKISEDKGIDDKEREELLSDLEEANKTKKLKGKHLYLYFSQLGIDLYTGKKMKIEEVLEGKYDIDHIVPQSLIKDDSLDNQVLVNKKYNQDVKKDIYPICDEIRSKMLNLWYNYKERGIIKEEKYNRLIRTTDLTDDEINDFVKRQINVVNYSNIQIKRIFELKYPDTEIIFSKAGFPSLLRKEYEIAKMRDLNDAHHAVDAYLNIVCGDILTSLYTDVFYLIKRKKEKKENPTFNMERRLLGYIKKNDLMNKIKSNCLRHDALITFKPDYDSGMFYKQTIFKKSGDKETGLIPLHTKGPMSDVKKYGGYSQLSQSFILAVEYKVKKKTIKKLLRVPTMYVKLYGDDLNKIAKLIVDDEKAINIKILRKICLNQKVKYNDCYHLIYTFDNTRCKLKMAYQNYIDNDALVYLNKCLKKIDELDDKDKTEQEIIVNKDGDKLKITKEDNLKIYKLIKEQYFKPIYKFITYITKSKEMSEDAFNNLSIKKQIDTLFNMIKILSRSNEDAKFDKSLNNGGTKYYRISMNIDNNKIYIVNESPSGLFKGKEELI

SEQ ID NO: 731 - protein, 1398 aa, synthetic construct
  REGION 1..1398: note = MG44-346 effector
MENKYYVGIDLGTSSVGWAATDENYNFLRLKGKTAWGARLFDGANTCKKRRERRSKRRRMARRKYRLLLLNQLFAEEMAKVDKTFFLRLANSTYWAEDKAKDDKGNDLGKNIIFKTWKEESEFYNNYKTIWHLRNELVKNNDNAFSDLRLVYLAIHHIIKYRGNFLTEGDNFNEKPTVELIRELNSILSKLDEENSNDFLLDDEESIIEDENNKYISEDKLDKLLEILKSDEYKSKKEKQNDIDKLFVKNRSQLIKKYIDMYKVLVTGGSFKISRIDKELGDLEIDFNNGFDENLDEIKSKLGNAIDLVFNAKKIHDYNSLSKLFGDKNANKNLSQIMVDVYDNHKKDLRNLKKVIRSVDVKLDKKGKESLYYSIFRPIKLTKEDNKRDENNKKTKKSQTPNYASFVQGDDINFKYVTLEKLNDNLKEVLEKNKQYIDDEETYIDLHDKAEKGILLQKPANVSTSLIPHQSHLQELKIILKNASDRYPFIKEIEDKIIKLFMFKVPYYYGPLSTSKSHPYAWVETKEEGTKITPWNMYDVVDEEKTRNKFMKRLINSCSYLDGEPVLPKVSLCYEEYLVLDSLNKMMLNGQFLSPSVKESVLKYILSRSKTTIGNIKTFLKKENELYQNELKDDDISISNIKSDIIFNASSHALLSKYFDLEKDKEMVESLILLATIYAGDSKSLIEAINSNKNYKELTKEQVNAISKLPTNKWGRLSKTFLCGGKDGEMYWVDESIGRCCSILEIMQETNKNLQEVLFDKTYKFQDKINKFNADLRGNKTVKDQIDDIYDEMPSVFVRSVTQTIAVLDDVVRAARCAPNKIYIEVTRADQEKKETKSRYDALKEVIKKELKDEADRRDSLLEKLEYANNSRKLRSINVYLYFLQLGIDFYTGEPIKDLNDVINGIYDKDHIVPQSLRPDDSIDNLVLVNKDYNEKVKRDIYPIVAPIRNEKTLKLWKSYHKRKLISDKKYNSLIRTTELTYEEINDFVNSQINVVNFSNVQLKRILELKYPDTKVCFTKAIYASSLRQKLSIAKMRDLNDSHHAVDAYLNIVGGDILSNLYTDVFYLYDEKKNKKKNVSFDMEKRLHNYIEDNNLKDKIRTNCFRHDALITYKPKFSTSKKAGDLYKETIFKKADKDSVNLIPCHTKGPMKDTKKYGGYSQINQSYILAVEYTSGKKTVKKLLRVPTMYLNLYGNNEEELLKLIVNDEKAKDIKILRKIYINQKIKYNGCYYRIFTKGKNNIYKMAYQNYIDNNIVLYLNKSLKLSDDLIDKTIDSQTFIINNKGEKFIISKEKNKIIFDTIKERMFNKRYDECSYFEKAREMKFEIFNNLSLKEQISTLINMLKLLSCSTESVNINAEFKVEKRLLFVNSPDITKEEIYIVNESPSGLFKGKEELI

SEQ ID NO: 732 - protein, 1393 aa, synthetic construct
  REGION 1..1393: note = MG44-347 effector
MKNNEETLKKLRLGLDIGTNSVGYALLDENNKLIKKNGHTFWGVRMFDEAETAKDRGSYRKSRRRLLRRKERMEILRSFFTKEICDIDPTFFERLDDSFYYKEDKKNKNTYNLFTSEYTDKDFYLEYPTIYHLRKAMQEEDKKFDIRMVYLAIAHIIKYRGNFLYPGEEFSTSEYTSIKQFFLDFNDILDELSNELEDNEDYSAEYFDKIENINDDFLEKLKVILMEIKGISNKKKELLDLFNVNKKSIYNELVIPFISGSAKVNISSLSVIKNSKYPKTEISLGSEELEGQVEEAISVAPEIKSVLEMIIKIKEISDFYFINKILSDSKTISESMVKMYDEHNEDLKKLKGFFKKYAEDQYNEIFKIRDEKLANYVAYVGFNKLRKNKVERFKHASREEFYGYLKQKLNNIKYAEAQEEIKYFIDKIDNNEFLLKQNSNQNGAFPMQLHLKELKTILNNQEKYYPFLSEGNDGYSIKEKIILTFKYKIPYYVGPLNKESKYSWVVREDEKIYPWNFDKVVKLDETAEKFILRMQNKCTYLKGDNDYCLPKNSLIFSEYSCLSYLNKLSINGKPIDPIMKSKIFNEVFLIKKQPTKKDIIEFIKTNYNADALTTTEKELPEATCNMASYIKMKEIFGKDFNDNKEMIENIIKDITIFEDKSILGNRLKELYKLNNDRIKQIKGLNYKGYSRLSKNLLVGLQIVDNQTGEIKGNVIEVMRKTNLNLQEILYLDGYRLIDAIDEYNRKNSLNDSYLCARDYIAENLVISPSFKRALIQTCSIIQEIERIFHKKIDEFYVEVTRTNKDKNKGKTTSSRYDKIKKIYSSCQELAMAYNFDMKRLKNELESNKDNLKSDILYFYFTQLGKCMYSLEDIDISDLTNNYHYDIDHIYPQSIIKDDSLSNRVLVDKKKNAAKTDKFLFEAKVLNPKAQQFYKKLLSLELISKEKYRRLTQKEISKDELEGFVNRQLVSTNQSVMGLIKLLKEYYKVDEKNIIYSKGENVSDFRHTFDLVKSRTANNFHHAHDAYLNVVVGGILNKYYTSRRFYQFSDIARIENEGESLNPSRIFTKRDKLKANGKVIWDKKEDIKRIEKDLYHRFDITETIRTYNPNKMYSKVTILPKGEGESAVPFQTTTPRVDVEKYGGITSNKFSRYVIIEAHGKKGLDTILEAIPKTACGDNNKIEKDIDNYIASLDEYQKYTSYKVVNYNIKANVVIQEGSFKYIITGKSGNQYVLQNVQDRFFSKKAMITIKNIDKYLNNKKLGIIMAKDNKKIIVSPARGKNNEEIFLGKTELVNLLKEIKTMYSKDIYSFSAIQNIVNNIDCSIDYSIDDFIIICNNLLQILKTNERKNADLRLIHLSGNSGTLYLGKKLKSGMKFIWQSITGYYEEILYEVK

SEQ ID NO: 733 - protein, 1381 aa, synthetic construct
  REGION 1..1381: note = MG44-348 effector
MEKKYYIGLDLGTSSVGWAATDENYNFLRLKGKTAWGARIFSEAVDCKERRSFRSNKRRVARRKYRLLLLKNLFAEEMAKVDKTFFLRLENSTYWAEDKAKDDEGNDLGKTLIFKTTEEEREFHKAYPTTWHLRKKLVDNDEQALSDLRLVYLAIHHIMKYRGNFLSDGTKDNEEPSKDTIDRINVILNLLEAKDNESGISDNITYLSKESYSELIETLEDKNLNKTKKQDKIKKLFKNVDKTNEDIKVYIDLFKTLVTGGVFSVKKINEEYDKLKIDFNNGFEDTADEISKALGDAYELVLIAKAYNDYISLKDLLGGKQYLSYVMADIYDEHKKDLKSLKKILVSIDYKLGNEGNNRVYNLVFKPVIVPKEERKDKDGKKNKKLTTPNYASFIQGDDVEKKSVTLENLNKNIKEILEANKQYVDEADKEEFDRLLDKASNNELFKKQATVSTSLIPHQCHLKELNKILENAGKKYPFIKENSDKIIQLFKFRVPYYYGPLNNESKEHAWIVKNEGKERTKITPWNIDEVVDRGRTREGFFKKLTNSCTYLVGETVLPKVSLVYEKYLALERLNKMQVNGNYLNHKDKIDLLNYILGNSNTTIENIRKKLASDTGMKINDIVISNIKNNVPFTATSHAFFRKHFNLENTKEFELCEDVIKYATIYADDKKELKKFLSEHRDYFGFDEKLIKEIANLQTNKWGRLSKKFLCGGAKDEMYYTDENGVMYTILGLLEETNQNLQEIVNSGKYGFDEKIKEFNDALTKDETIDEQISKILEGTPALMVRSITQTIKVVDDVIKAAKCEPKKIIMEVTRTDEKKGQEVASRYIQLKKKISEDKEIDDKEKEGLLSDLEEANKTKKLKGKHLYLYFSQLGIDLYTGKKMKIEEVLEGKYDIDHIVPQSLIKDDSLDNQVLVNKKYNQDVKKDIYPICDEIRSKMLNLWYNYKERGIIKEEKYNRLIRTTDLTDDEINDFVKRQINVVNYSNIQIKRIFELKYPDTEIIFSKAGFPSLLRKEYEIAKMRDLNDAHHAVDAYLNIVCGDILTSLYTDVFYLIKRKKEKKENPTFNMERRLLGYIKKNDLMDKIKSNCLRHDALITFKPDYDSGMFYKQTIFKKSGDKETGLIPLHTKGPMSDVKKYGGYSSLSQSYLLAVEYKVKKKTIKKLLRAPTMYVKLYGDDLNTIAKLMIDDEMATDIKVLRKIYLNQKIKYNGCYYLIYTNNEIQNKYKMAYQNYIDNDALVYLNKCLKKIDELDDKDKIEQEIIVNKDGDKLKITKEENLKIFKLIKEQYSKPIYESTPYIVKSKEMPEDAFSNLSLKNQIDTLFNMIKILSRSNEDAKFDESLKNSGTKYYRVSNNITNLDTYIVNESPSGLFKGKEELI

SEQ ID NO: 734 - protein, 1334 aa, synthetic construct; identical to SEQ ID NO: 629
  REGION 1..1334: note = MG44-349 effector

SEQ ID NO: 735 - protein, 579 aa, synthetic construct
  REGION 1..579: note = MG44-350 effector
TREDGQKGDKGRTVSRKRQLSEKYKAITSADFEGIDNVAAELGRDDMTDMRLRREKLYLYFRQLGRCAYSGKPIDLEALNKDGASKRYDVDHILPRTFVKDDGLDNKVLVLRECNALKSDTYPLPNDLRQNSLWKLWLNKGLIGRKTYERLTRTESLGDSDYADFENRQKVITDQTAKAVAGLMKIKFPNSKIVYSKAKNVSDFRQRFDLFKCRETNDLHHARDAYLNIVVGNVYDVRFSGNFRYKDGDAWREYNLKNLFTRDIRGAWNTATSEETVKKTYGKNSMIVTRLAVCGKGGFYNQTVYGSGDGSITQPRKTIGPLSDPSKYGGYKSENTAYFAIVRSTDKKGKRVTTIEAIPVLTSYREKKDTGAVTEYLTKTRGLADLEIVVPKVKVKQLFRYNGTLLYIAGITGKQITAHNATELFTDNKTDEYVRELAKLSAMRKEKKIDETQERYIMKTNALGEEKLVIDRDRNLAFYNLLVEKLGKDRYKGVSAFGVILGYLSKGKDAFMCLSVVNQVQVLLEILKFLRCTADAADLRLLNGSQQSGKIVFNQDITNVKFELVYRSATGLTERVRKI

SEQ ID NO: 736 - protein, 1171 aa, synthetic construct
  REGION 1..1171: note = MG44-351 effector
DIRDFSNLMKGLDCAIADSYDGGLNLFDSVDSAKVRDILIDKKSGLRDKQVELEKLLCVKSKREKEILKGITGQKISPYVLFGDEFKEEKSFSLNDMSDEEFESKRSSYGESFTLLDLMHSVCNYVKFEKIFEGHSDISSAMISVYEKHKADLVLLKKVVRKQSKEDYNKIFRSVNEEKNYVNYIGYTSKDGRKIKVKKCKGEDFFKYLKKYLNGILNEDNFDIVSKIIKEIDDRIFLPKILHSDNGLFPKQVNEFELKKIIENMVRNYAETEEMASAVLSLFNYKIPYYVGPLTGCNSWVVRTDEKVTPWNFDRVVDLAKSNEAFMRRMTNKCAYIKGEDVLPKASIIYQKYDTLNQLNKLRINDRVISIELKQTIYNELFLKYPKVTDKKIKELLVREGLCSSSETKDITISGKDGDFKSSMSSYIRLKNILGDFVDDDLKSGGKVCENIILWHTLNTDKKIVEDLIEKNYGFIPEIKANIKQLKGLTFNDFGRLSAKLLIGIEGVDKTTGQILTILDVLYQTNQNLNEVLNNESYNFSEIIDEENGIETEIISYETVEELYVSPAVRRGIWQTLLMIDEYVNAVGRQPDKIFIEVTRNDGKKGDNGRTQPRKRQLQEKFKNIGSAYSDIIEELSEEKYTDLKLRQERLYLYFRQLGRCMYTGERIILDELNGNRYDVDHILPRTYVKDDSLDNKVLVCRGANATKADTYPLPTEFSRKEVRAHWKMLLDKDLISKTTYDRLTRIEPLKDDDYNDFINRQKTITDQTAKAVIELLKRKYPNAKLIFSRAKNVNDFKNRFNLFKCRETNDLHHARDAYLNVVVGNVFDSVFSTPLGQSRKDGDVWRIYNLKKLFTRDVIGVWSKDSIKIVKDTYSKPSMSVTRYATCNKGKFYDETVCRKNDSAITAPRKGKGPLSDVTKYGGYTTQKTAYFAIVTSVDKKGKSIKTIEAIPVLVTYKLKTDTNAIQKYLESYLREPIIVIPKVKVKQLVSYNGSLCYLAGTTDNRITVHNASQLYTDNTTDEYVNELIKIIGMGDNGIITGNESQYITKTNKDGVIRIVVNKENNEKLYETLKNKLDSKIYKGLSAFASFKTNMERGKDKFCKLSVLEQAKVLLQILKVFRCNAVNSNIELIGGGRGSGSIKINKNITDVDFKLVNLSPAGLTVRIRKV

SEQ ID NO: 737 - protein, 1398 aa, synthetic construct
  REGION 1..1398: note = MG44-352 effector
MENKYYVGIDLGTSSVGWAATDENYNFLRLKGKTAWGARLFDGANTCQKRRERRSKRRRMARRKYRLLLLNQLFAEEMAKVDKTFFLRLANSTYWAEDKAKDDKGNDLGKNIIFKTWKEESEFYNNYKTIWHLRNELVKNNDNAFSDLRLVYLAIHHIIKYRGNFLTEGDNFNEKPTVELIRELNSILSKLDEENSNDFLLDDEESIIEDENNKYISEDKLDKLLEILKSDEYKSKKEKQNDIDKLFVKNRSQLIKKYIDMYKVLVTGGSFKISRIDKELGDLEIDFNNGFDENLDEIKSKLGNAIDLVFNAKKIHDYNSLSKLFGDKNANKNLSQIMADVYDNHKKDLRNLKKVIRSVDVKLDKKGKESLYYSIFRPIKLTKEDNKRDENNKKTKKSQTPNYASFVQGDDINFKYVTLEKLNDNLKEVLEKNKQYIDDEETYIDLHDKAEKGILLQKPANVSTSLIPHQSHLQELKIILKNASDRYPFIKEIEDKIIKLFMFKVPYYYGPLSTSKSHPYAWVETKEEGTKITPWNMYDVVDEEKTRNKFMKRLINSCSYLDGEPVLPKVSLCYEEYLVLDSLNKMMLNGQFLSPSVKESVLKYILSRSKTTIGNIKTFLKKENELYQNELKDDDISISNIKSDIIFNASSHALLSKYFDLEKDKEMVESLILLATIYAGDSKSLIEAINSNKNYKELTKEQVNAISKLPTNKWGRLSKTFLCGGKDGEMYWVDESIGRCCSILEIMQETNKNLQEVLFDKTYRFQDKINKFNADLRGNKTVKDQIEDIYDEMPSVFVRSVTQTIAVLDDVVRAARCAPNKIYIEVTRADQEKKETKSRYDALKEVIKKELKDEADRRDSLLEKLEYANNSRKLRSINVYLYFLQLGIDFYTGEPIKDLNDVINGIYDKDHIVPQSLRPDDSIDNLVLVNKDYNEKVKRDIYPIVAPIRNEKTLKLWKSYHKRKLISDKKYNSLIRTTELTYEEINDFVNSQINVVNFSNVQLKRILELKYPDTKVCFTKAIYASSLRQKLSIAKMRDLNDSHHAVDAYLNIVGGDILSNLYTDVFYLYDEKKNKKKNVSFDMEKRLHNYIEDNNLKDKIRTNCFRHDALITYKPKFSTSKKAGDLYKETIFEKADKDSVNLIPCHTKGPMKDTKKYGGYSQINQSYILAVEYTSGKKTVKKLLRVPTMYLNLYGNNEEELLKLIVNDEKAKDIKILRKIYINQKIKYNGCYYRIFTKGKKNIYKMAYQNYIDNNIVLYLNKSLKLSDDLIDKTIDSQTFIINNKGEKFIISKEKNKIIFDTIKERMFNKRYDECSYFEKAREMKFEIFNNLSLKEQISTLINMLKLLSCSTESVNINAEFKVEKRLLFVNSPDITKEEIYIVNESPSGLFKGKEELI

SEQ ID NO: 738 - protein, 1381 aa, synthetic construct
  REGION 1..1381: note = MG44-353 effector
MEKKYYIGLDLGTSSVGWAATDENYNFLRLKGKTAWGARIFSEAVDCKGRRSFRSSKRRVARRKYRLLLLKNLFAEEMAKVDKTFFLRLENSTYWAEDKAKDSEGNDLGKTLIFKTTEEEREFHKTYPTTWHLRKKLVDNDEQALSDLRLVYLAIHHIMKYRGNFLSDGTKDNEEPSKDTIDRINVILNLLEAKDNESGISDNITYLSKESYNDLIETLEDKNLNKTKKQDKIKKLFKNVDKTNEDIKVYIDLFKTLVTGGVFSVKKINEEYDKLKIDFNNGFDDNADEISKALGDAYELVLIAKAYNDYISLKDLLGGKPYLSYVMADIYDEHKKDLKSLKKILVSIDYKLGNEGNNRVYNLVFKPVIVPKEERKDKDGKKNKKLTTPNYASFIQGDDVEKKSVTLENLNKNIKEILEANKQYVDEADKEEFDRLLDKASNNELFKKQATVSTSLIPHQCHLKELNKILENAGKKYPFIKENSDKIIQLFKFRVPYYYGPLNNESKEHAWIVKNEGKERTKITPWNIDEVVDRGRTREGFFKKLTNSCTYLVGETVLPKVSLVYEKYLALERLNKMQVNGNYLNHSDKMDLLNYVLGNSNTTIENIRKKLASDTGMKINDIVISNIKNNVPFTATSHAFFRKHFNLENTKEFELCEDVIKYATIYADDKKELKKFLSEHRDYFGFDEKLIKEIANLPTNKWGRLSKKFLCGGAKDEMYYTDENGVMYTILGLLEETNQNLQEIVNSGKYGFDKKIKEFNDALTKDETIDEQISKILEGTPALMVRSITQTMKVVDDVIKAAKCEPKKIIMEVTRKDEKKGQEVASRYIQLKKKISEDKGIDDKEREELLSDLEEANKTKKLKGKHLYLYFSQLGIDLYTGKKMKIEEVLDGKYDIDHIVPQSLIKDDSLDNQVLVNKKYNQDVKKDIYPICDEIRSKMLNLWYNYKERGIIKEEKYNRLIRTTELTDDEINDFVKRQINVVNYSNVQIKRIFELKYPDTEIIFSKAGFPSLLRKEYEIAKMRDLNDAHHAVDAYLNIVCGDILTSLYTDVFYLIKRKKEKKENPTFNMERRLLGYIKKNDLMDKIKSNCLRHDALITFKPDYDSGMFYKQTIFKKSGDKETGLIPLHTKGPMSDVKKYGGYSSLSQSYLLAVEYKVKKKTIKKLLRVPTMYVKLYGDDLNTIAKLMIDDEKAINIKILRKICLNQKVRFNNCYYLIYTSDDTRCKLKMAYQNYIDNDALVYLNKCLKKIDELDDKDKTEQEIIVNKDGDKLKITKEENLKIFKLIKEQYSKSIYNSITYIVKSRDILEDSFNNLSIKKQIDTLFNMIKILSRSNEDAKFDESLKNGGIKYYRISMNIDNNQIYIVNESPSGLFKGKEELI

SEQ ID NO: 739 - protein, 1347 aa, synthetic construct; identical to SEQ ID NO: 631
  REGION 1..1347: note = MG44-354 effector

SEQ ID NO: 740 - protein, 1346 aa, synthetic construct
  REGION 1..1346: note = MG44-355 effector
MNNKKYFVGLDIGTNSVGWATSDENYQLLHLKHKSAWGVNLFDAAETAEKRRVYRTTRRRLQRRRQRVLLLQDLFKDEMHKIDQYFFLRLNNSAYFSEDKNELLNSSRFNLFSDKDFTDKEFFKKYKTIYHLQKDLIENKDTKFDLRYIYLAVHHLVKYRGHFVLADQRINIDEFEYEQINLIFEELNDYLLTAELPVIFSSNHIESFNEVVRKTSGVINTSSRLETLFECSDKSIKAAFRLISGGAVKTKNLFSHLILSETVEKETIDLSSPTYDTEKYPLLAKELGDDIVFLDSLKRLYDHIVIVRLMKGKKLVCETMVERYEKHSEDLKKLKLLIKSTRDKELYFSIFRDTKSKNANYPSYVGSNKSNTKKTSVNKKGYQDFLDYIKKVIIDRNLETILAKEILSDIEEKVFMPRLDTKDNATIPYQFNEYQLDLILQNAAKFYPFLNDIEEGINVIDKIKSLISFRIPYYVGPLDNRSKFSWVVRKSDEQVKPWNFGSIIDIEKSAQAFIMKMTNKCVYLKGEDVLPKESLLFEEFVVLNTLNCLKVNGKLIDYDTKQLIFNFVKQKKTVTTNMIMKLLMANNIVVEALSGIDETAKLSLSTYHKFLPIFGESIDKYKELIEKIVFYSTIFPEGIVFKNKLYSDFKNILTKEQLSTISKMKFSGWSSLSRAFLTGYSKLQEDNVLTNLKTGEIISIIDIMRDEQLTLQQVLYDKRFNLQELLYKYNLTYSENMTINDYIDEMYISPSVKRPVKKAIHIIDEIISITNSKPNKIFIEVTREEGKPERKISRQQKLINLYKPILKDNEHLKVLYQEIVSRKDADFKPKKLLLYFIQQGKCMYTGQSISINELMTDKYDIDHIIPQSKIDDDSISNLCLVTNKSNKDKADVYPLNYEIIQRMKPFWQSLLKENFIDDNKYNRLIRVEPLSDQDLAIFINRQLVETSQANKAIADILKKYYPESEVIYSKARNVTLFRGKFSIYKYREINKAHHAHDAYLNIVVGNYFHSKYGYKYYAEQGKTNFNPNMFFEEKNLSFWNLNRDINTVKKMLDRRDILFTRSYNFGSGEFYEQNLSKAGTNLTPASLTSPLADTSKYGGYSGKTTSSFALIEVKKGNKLERKLFPLSSIDKLMCDKQGVQLRDFISKDLGLEVRVLIDRLPINSLIIRKGTTRYLSGKDTVSTLIAHKHDEPYFSNDFCRYHRLLSKVDFNNIDDFEKNVIIVLPTNHDTEASNVSLEKNIIHFDEIVQQYSKKIYKGIYEDISQTLIDHRDVFLNLPILKQVAILIDLVKLLQTGPILKLDLASIGIGSSINRGRLATNIQQDDCLITQSITGLHEKKTKIWNVK

SEQ ID NO: 741 - protein, 1411 aa, synthetic construct
  REGION 1..1411: note = MG44-356 effector
MENNNKQFYLGLDIGTSSVGWAVTDTNYKLIKKKGKNLWGVRLFEEGKSAADRRVFRTNRRRLERQKQRVQWLQEIFGPEIEKVDPEFFIRLNNSAFWLEDKEIDSKYSLFSDETYCDIQHFKKYPTIYHLQKELIDNKKPAYDIRLVYLALHHLVKHRGHFLLENMTLSTNGKEEYGVKLFQEIDDILSELNDDISTFFSEKVSYQILSILADKANRGSTRKIEKFKELFPESDKTHVAIFKLLSGGTEKIANILHDVQLDELEKPSICFGDSKFEEEVLSVLEETLGDSFSLIEKLYTLYGYILYKNVIGENAFLCEAKIKQYHKHHQELAELKQFFKKYYPSFYNAMFRQFAEDNNFKLANAPFCPYTNYIGSTKVRNNKRNFSINNKKRGKAEKCDHAIFLKSLKGFLTKTTPMNEDDAFIEHKNKIMELIDQGDYLKKLSMKDNASIPYQVNYVEMEKILDNASNYLPFLKDVTSDDLSNRDKILQIMKYRIPYYVGPLNDAHSNLQNAFAWVVRKEKGAVNPYNFQQKIDEASSQQRFIRRMTNKCTYLYGQDVLPASSLLYCEYDLLNKLNVLKLNGEPINQKLKSQLINELFKKRKSVKIKDIDTYLKQQGIKGECTFSEIDLDNTIFPKSNYADFSAILGADMDRNINIIETIIVWLSIFTNSNTIEELIYKNYANSFSDQRIKQLSRVKLVNPKWGRLSRELLNGPHFVLTTRQGEVKTIIEIMRETNLNFMQILNTEEYDALNAIENFNNLARGQVTSIEDVIDEEIENSYVSPAVKRSYYQAMKVVDEITHVLGNSPKRIFVEVTRASDEKKKGKKTSSRHTQLESLYKEAVKTIPEIKSLSVDLDVAIDDKLQSDRLFLYFLQLGKCMYTGKPIDIQRIMTKDYDIDHIYPQSYVKDDSLDNRVLVTKDANMKKGAIFPINNDVQVKMKDQWKSLKDSKFISEEKYQRLTRTLPFTDDERKAFINRQLVTTAQSVLSVINILKKKFDVDTEIVYSKARNVSEFRQKFDFYKIRDINDLHHAKDAYLNIVVGNAYHEKYTVNRSFYSENQKSNQLSNMFETNIKNAWNTENNASIKLVRKIMGQNDIIVSKKVKQIYNGGLFDQQLVSYHNESSNLAPIKEKGPLSNTKHYGGFNSISIAYFAAFASKDKKGKSIVTIESIPTMFLNKMKRKEIDLQSMAEDYFNLRDPQLVYAPIYPGSKLKIENGFYYISGKTGSRYALTNATQLILPSYLEKYVGTMIKINKIYEGFSKEKKKEYLDDLTISDWKLSKNENSHDERLISKEENLILLNFIDEKITNNIFNLLLTKNYIQDVKCVFSQLSLIRQVKVFLGIINTIICAPNTVKFIDLFPNDEEYKKVKKEIGRITIGKNITQSNISLIHESPTGLFHQEIVLNRKDN

SEQ ID NO: 742 - protein, 1601 aa, synthetic construct
  REGION 1..1601: note = MG44-357 effector
MENSNNSKKYYLGLDMGTDSCGWCVTDDKYNIIRSHKKTYGPDGKLIKKEGCHLWGARLFGPAKTAKNRRLNRTARRRLARRRRRIILLRELFQPEMDKIDPNFFRRLDQSNLWNEDKDKELQIEHNFLFNDKDLTDKEYYKDFPTIYHLRQAMVNGLPINGHYYDPKKQFDIREVYLVLAHMIKYRGNFLMEGDVQGSVVDPTYLKQCFDNIDNLIKNSIDEDNADKEDDDKIISSEYCFNVDIKKADRLINLFKNESGKQNLKDSEKIEFGKNLTGIRQSLLSLINGSAVSLKDLLPKDQILDEEFGKNKIDFSKESFENDLDSYNLNDFYSQVLLEAKKIYDFRILAHLLHDNRFLCDAMVNVYKEHKEQLAALKRLYKKFATKEQYYFMFRDPKILGLGDSNGKNKKKSKVKNQPKASYVSYIGYTKTSGKRKYTGAHVTKEETIDDLIKQIKDDIGSSIGKYAKYIISKENAYKKDKKGKETLKVGAYKVRLSNNNPNNEETIFYTANDETLIGNEKKDNPYFSEDSKEKKDSVLIMKVLESKIRFLPRQNSRNNGVFPYQLNLNEMRTIIENQSKYYPFLKDKAPSFPDGKTEEYKIVSLLKFKMPYYIGPLSQPNNYVRDDKRDNHWVQFKGENNQGIINPWNFSQIVDMEGTADKFINNLTNYCTYIFGENTLPKESLIFQAYKVLNDLNNLKVNGSLISKEDKDYVIENVYLKKRKIKGKDILNALKHKYKDEPSITTKGSGKSIGEDEVDLTMFNSSLSSFIDLSDSNAFGPEFYKDSSKFELAEKVIELITIVEDKDLLKERLKKLGLSDNQVNFLSRKNYSGWASLSRKLLDGITIDCVNENTGEAYPVTIIDVMRDTSLNFMEIFETKNSQFSGFKEKVAELNDEKNICRDDLIDESYASPAMKRSVRQTFKVIDELKSTLKINHFERIFVEATRAPGEAGKMVKSRKKQLEVAYDAAKDLVDQELRDDLEKQTDDQLRRKKVYLYFMQLGKSVYSGEKIDLNELDKKYDIDHIIPQAKLKDDSFNNMVLVERELNNKKQDEYPIPSTIISEQGRNWILKLSNIKDKNKRFYLMPKDKTHRLLRPESKQLTSDELNGFINRQLTLTNQSVKAVCDILKMTEKGSEIVYSKANFVSDFRKLCGELRPSYDAFVKVRDINDFHHANDAYLNIVVGNVYYEKFKNFYINNRIDYDNNGKKDLSVLASKLFTKTQTDDKTGIVYWEAHFHNEKEADSNGKERTIKVRDEGTESTFDKIEHYMELNDPLVTQMRYTLSGKQGFFNKITLKAKAKKNEDNSDKLFPLKQHLRSDSNKVMDVNKYGGYSDMSNPYFMLVKSDGKKGEHIYSLESIPMICLKSFKNEKDKIEYLVKVNGLNNPVIIVDKLLMKSTLEIPQVSNDGNICGCTKLAFTGRTNNNVVLINLSELHLPLEWKKYYKKISNFYETNASAAEKKNHNFDVFEEQMKEDPTSDLKSGAIVLTQFDNKRFYSYLAGNVFAKAMYKGIPTIGSSFAKLKDKYEVFCNLNTLEQGKVLIGLIKLLSCKSVQGTDLSLIGLSENLGLISMSKTLEEGCSIVQESATGLNRFVIYVVE

SEQ ID NO: 743 - protein, 1601 aa, synthetic construct
  REGION 1..1601: note = MG44-358 effector
MENSNNSKKYYLGLDMGTDSCGWCVTDDKYNIIRSHKKTYGPDGKLIKKEGCHLWGARLFGPAKTAKNRRLNRTARRRLARRRRRIILLRELFQPEMDKIDPNFFRRLDQSNLWNEDKDKELQIEHNFLFNDKDLTDKEYYKDFPTIYHLRQAMVNGLPINGHYYDPKKQFDIREVYLVLAHMIKYRGNFLMEGDVQGSVVDPTYLKQCFDNIDNLIKNSIDEDNADKEDDDKIISSEYCFNVDIKKADRLINLFKNESGKQNLKDSEKIEFGKNLTGIRQSLLSLINGSAVSLKDLLPKDQILDEEFGKNKIDFSKESFENDLDSYNLNDFYSQVLLEAKKIYDFRILAHLLHDNRFLCDAMVNVYKEHKEQLAALKRLYKKFATKEQYYFMFRDPKILGLGDSNGKNKKKSKVKNQPKASYVSYIGYTKTSGKRKYTGAHVTKEETIDDLIKQIKDDIGSSIGKYAKYIISKENAYKKDKKGKETLKVGAYKVRLSNNNPNNEETIFYTANDETLIGNEKKDNPYFSEDSKEKKDSVLIMKVLESKIRFLPRQNSRNNGVFPYQLNLNEMRTIIENQSKYYPFLKDKAPSFPDGKTEEYKIVSLLKFKMPYYIGLLSQPNNYVRDDKRDNHWVQFKGENNQGIINPWNFSQIVDMEGTADKFINNLTNYCTYIFGENTLPKESLIFQAYKVLNDLNNLKVNGSLISKEDKDYVIENVYLKKRKIKGKDILNALKHKYKDEPSITTKGSGKSIGEDEVDLTMFNSSLSSFIDLSDSNAFGPEFYKDSSKFELAEKVIELITIVEDKDLLKERLKKLGLSDNQVNFLSRKNYSGWASLSRKLLDGITIDCVNENTGEAYPVTIIDVMRDTSLNFMEIFETKNSQFSGFKEKVAELNDEKNICRDDLIDESYASPAMKRSVRQTFKVIDELKSTLKINHFERIFVEATRAPGEAGKMVKSRKKQLEVAYDAAKDLVDQELRDDLEKQTDDQLRRKKVYLYFMQLGKSVYSGEKIDLNELDKKYDIDHIIPQAKLKDDSFNNMVLVERELNNKKQDEYPIPSTIISEQGRNWILKLSNIKDKNKRFYLMPKDKTHRLLRPESKQLTSDELNGFINRQLTLTNQSVKAVCDILKMTEKGSEIVYSKANFVSDFRKLCGELRPSYDAFVKVRDINDFHHANDAYLNIVVGNVYYEKFKNFYINNRIDYDNNGKKDLSVLASKLFTKTQTDDKTGIVYWEAHFHNEKEADSNGKERTIKVRDEGTESTFDKIEHYMELNDPLVTQMRYTLSGKQGFFNKITLKAKAKKNEDNSDKLFPLKQHLRSDSNKVMDVNKYGGYSDMSNPYFMLVKSDGKKGEHIYSLESIPMICLKSFKNEKDKIEYLVKVNGLNNPVIIVDKLLMKSTLEIPQVSNDGNICGCTKLAFTGRTNNNVVLINLSELHLPLEWKKYYKKISNFYETNASAAEKKNHNFDVFEEQMKEDPTSDLKSGAIVLTQFDNKRFYSYLAGNVFAKAMYKGIPTIGSSFAKLKDKYEVFCNLNTLEQGKVLIGLIKLLSCKSVQGTDLSLIGLSENLGLISMSKTLEEGCSIVQESATGLNRFVIYVVE

SEQ ID NO: 744 - protein, 1619 aa, synthetic construct
  REGION 1..1619: note = MG44-359 effector
MENSNNSSKKYYLGLDMGTDSCGWCVTDDKYNIIRSHKKTYGPDGKLIKKEGCHLWGARLFGPANTAKNRRLNRTARRRLARRRRRIILLRELFQPEMDKIDPNFFRRLDQSYLWNEDKDKELQMEHNFLFNDKDLTDKEYYKDFPTIYHLRKAMVNGLTINGHYYDPKKQFDIREVYLVLAHMIKYRGNFLMEGDVKGSVIDPTYLKQCFDNIDSILLNLNNDEDNENEDDQIDSSECCFNVDEKKASKLANEVFQKINKVSYLEDEEGKLFGKFNSKDIRKKILKLINGGSGVKLKDFLPKEILVAHDGDDEYGDKKIDLSSETLEDDINGYGLPESYIEIILEAKKIYDFRTLAYLLHGKSLLCDAMVNVYKEHKEQLAALKRLYKKYATKEQYYFMFRDSRILDGDDSDDKEDKEESNKEESKDKKKKASYVSYIGYTKINGKRKHTGAHITKEEKIDDLIEIIKKNIGSSIGKYAKYIIGKENAYKKDKKEKEKLKEGAYKVRLSNNNPNDEETFFYTTNDETLAGKEKKDNPYSFEDSKEKEDSVLIMKALEGKIRFLPRQNSRNNGVFPYQLNLNEMRTIIENQSKYYPFLKDKAPSFPDGKTEEYKIVSLLKFKIPYYIGPLSQPNDYVRDDKRDNHWVQFKGENNQGIINPWNFSQIVDLEGTADKFISNLTNYCTYIFGENTLPKESLIFQAYKVLNDLNNLKVNGSLISKEDKDYIIQNVYLKKKKIKGKDILNALKHKYKDEPSITTKGSGKSIGEDEVDLTMFNSSLSSFIDMSDSNAFGPEFYKDSSKFELAEKVIELITIVEDKDLLKERLKKLGLSDNQVNFLSRKNYSGWAPLSRKLLDGITIDCVNENTGEAYPVTIIDVMRDTPLNFMEIYETKESQFSGFKEKVVELNDEKNICRDDLIDESYASPAMKRSVRQTFKVIDELKSTLKINHFERIFVEATRAPGEAGKMVKSRKKQLQEAYDAAEAYDAAKDLVDQKLRENLEKQTDDKLRRKKVYLYFMQLGKSVYSGEKIDLDKLDENYDIDHIIPQAKLKDDSFNNMVLVERELNNKKQDNYPIPSTIMSEQGRKWIQTLTNIKDKNKRSYFMPKDKAYRLLRPESKQLTLDELNGFINRQLTLTNQSVKAVCDILKMTEKGSEVVYSKANLVSDFRKLCGELRPSYDAFVKVRDINDFHHANDAYLNIVVGNVYYEKFKNFYKYNHVEYDTNGKKDLSVLASKLFTKTQADDKTGIVYWEAHFHNEKEIDANGKERRIKVRDEGTESTFDKIEHYMELNDPLVTQMRYTLSGKKGLFNKITLKTKAKENKDNSGKLFPLKQHLRSDSNKVMDVNKYGGYSDMSNPYFMLVKSDGEKGKHIYSLESIPMICLKSFKNEEDKIEYLVKVNGLNNPVIIVDKLLMKSTLEIPQISNDRNVYEYVRLAFTGRTNDNLVLINLSELHLPLEWKKYYKKISNFYGTNASAAEKKNHKFDVFEEQMKEDPTSDLKSGAIVLTQFDNKRFYSYLANNVFAKAMYKGIPTIGTSFAKVKDKYEMFCNLNTFQQGKVLIGLIKLLSCKSVQGTDLSLIGLSKNLGLISMSKTLKDGTHIVQESTTGLTKNLIYVVE

SEQ ID NO: 745 - protein, 1614 aa, synthetic construct
  REGION 1..1614: note = MG44-360 effector
MENSNNSSKKYYLGLDMGTDSCGWCVTDDKYNIIRSHKKIYGPDGKLVKKEGCHLWGARLFGPAKTAKNRRLNRTARRRLARRRRRIILLRELFQPEIDKVDPNFFKRLDQSNLWNEDKDKELQMEHNFLFNDKDLTDKEYYKDFPTIYHLRKAMVNGLTINGHYYDPKKQFDIREVYLVLAHMIKYRGNFLMEGDVKGSVIDPTYLKQCFDNIDNLIKNSIDEDNADKEDDDKIIPSEYCFNVDIKRANRLIKLFENESGKQNLKDSEKIEFGKNITGIRQLLLSLINGSAASLKDLLPKDQILDEEFGKNKIDFSKESFENDLDSYNLNDFYSQVILEAKKIYDFRTLAYLLHGKGLLCDAMFHVYKEHKEQLAALKRLYKKFATKDQYYFMFRDSKILGLGDSNGKNKKKSEVKNQPKASYVSYIGYTKTSGKRKYTGAHVTKEEIIDDLIKQIKYDIGSSIGKYAKYIISKENAYKKDKKEKEKLKEGAYKVRLSNNNQNNEETFFYTTNDEILAGKEKKDNPYSFEDSKEKEDSVLIMKALEGKIRFLPRQNSRNNGVFPYQLNLNEMRTIIENQSKYYPFLKDKAPSFPDGKTDEYKIVSLLKFKIPYYIGPLSQPNDYVRDDKRDNHWVQFKGENNQGIINPWNFSQIVDLEGTADKFISNLTNYCTYIFGENTLPKESLIFQAYKVLNDLNNLKVNESLISKEDKDYIIQNVYLKKKKIKGKDIRDALIKKYKNPTIRIITKGSGKEVGEEEVDLTMFNSSLSSFIDMCDERGFGNDFYKNESLFNKAEKVIELITIFEDKKLLKERLKKEGLNEEQVKYFSTKSYSGWASLSRKLLDGITIDCVNENTGEAYPVTIIDVMRDTSLNFMEIFETKNSQFSGFKEKVAELNDEKNICRDDLIDESYASPAMKRSVRQTFKVIDELKSTLKINHFERIFVEATRAHGDMGKIIKSRRKQIDSAYKAAKKVVGEEVNDLVGQLNNCSDDELRSKKIYLYFMQLGKSVYSGEKINLNNLENYDIDHIIPQSKLKDDSFDNIVLVEKALNNKKQDIYPIQDNILSKEGKKWIDTLSEIKGENGKSYLMPKDKKNKLLRPSEKELTSSELNGFINRQLTMTNQSVKAVCDILKMTERDSDIVYSKANLVSDFRKLCGELSFRKLCGELSPYYAFVKVRDINDFHHANDAYLNIVVGNVYYEKFKDFYKYNHVEYDTNGKKDLSVLASKLFTKTQADDKTGNIYWEAHFHNEKEIDANGKESTIKVRDEGTESTFDKIEHYMELNDPLVTQMRYTQKGDQGLFGHITLMKKAKIKENNTDKYYPLKQHLRSNGEVMDVNKYGGYSNMITPYYLLVKSDNEEGKHIYSLESIPTIYLNSFKNEKEDIVNYLSKKNKLKNPIVLLDKLLIRTIVKIPYYRNNDSHFSLLKLGITGRSENDITYINLSELILSIKWKNYYKKISNLLGTNVSSSKAKDLSKYKDQMKNDPISTLVDGTNKVEHDMNNSFFSYLIDKVICKSIFEGLPKSSKSFIKLESKYDEFCSLNTLEQAKIIATIIKLLSCKSVQKQDLSLLSDLPSQLGEISQNKELPCGSEISYESCCGLKEYILFVVPND

SEQ ID NO: 746 - protein, 1369 aa, synthetic construct
  REGION 1..1369: note = MG44-361 effector
MADKLFIGLDVGSDSVGWAATDENFRLYRLKGKTVWGARIFSEANDAKGRRGFRVAGRRLARRKERIRLLNVLFDPLLKEKDPTFLLRLGNSAIQNDDPNKPAQAVADCPLFINKQEEKDYYKRYPTIWHLRKALMENEDHAFSDIRFLYLAIHHIIKYRGNFLREGDIKIGQFDYSIFDRLNETLAVLFDSQNEDDENEENCFIGLPKSQYEGFITCANDRNLPKQPKKTKLLSMFEKTEESKAFLEMFCTLCAGGEFSTKKLNAKGEETYQDTKISFNFSYDENEGTYQETLGDFFDLVDIAKAVFDYCDLSDILNGKNDLSSAFVELYESHKSQLSALKSICKGIDKQNGFEGEKSIYVKLFNDPNDKSNYPAFTHNKTLVDKRCDIHTFDKYVIDAILPYESLLAGKDAINWQMLKSLAEQDRLLQTIALRSTSVIPMQLHQKELKLILKNAISRNIKGIAEIEDKILKLFQYKIPYYCGPLTTKSDYSNVVFKNNEYRPLKPWDYEEAIDWDETKKNFMKGLTNKCTYLKDENVLPKQSILYQDFDTWNKLNNLKVNGNKPSFEELNDLFSFVSQRSKTTMRDIQRYWKSKTSQKENDVIVSGWNPEDYICCSSRASFAKNGVFDLIHPDINNPKDLNKCEGIIFLKTIYTDSPKDADAVIVKEFPDLTNNQKALLKTIKCKEWSPLSKEFLELRYSDKYGEIRQSIIDLLRNGEGNLMQILAKYDYQEVIDAYNAASFQTKSKSQIVSDLIEEMPPKMRRPVIQAVRIVQEVSKVAKKEPDQISIEVTRENNDKEKKQELTKKAKSRSTQIQNFLKNLIKIDISQKKQADEVLEELKKYSDQSINGKHLYLYFLQNGKDAYTGKPINIDDVLSGNKYDTDHIIPQSKMKDDSIDNLVLVEREINQHRSNDYPLPESIRKNPANVAFWRKLKKAGMMSEKKFNNLTRSNPLTEEELGAFVAAQINVVNRSNVVIRDVLKILYPNTKLIFSKAQYPSQIRKELNIPKLRDLNDTHHAVDAYLNIVSGVSLTNRYGNMAFIKASQNNKNEEDYSFNMERFISNLIQKGKGKKTSLGELIDQTSRRHDFLLTYRFKYSDSAFYKQTIYKKDAGLISVHENMPPERYGGYDSMANEINCIVTIIGKKMTRYLVGVPHLLLTKAKKGIDVTDDIVKLVPHKENEMVKVDLKAILPLDCAVKKDGFTYLCTSQNTAQVKMKPFSPIFLTRRSEIYISNLIKFVEKYPAIANTEAGYIPKTNRMGENTIIFSRDISEDVLKELIALSNQSRFDYCPMIFKLRTLVPSEIIQNKTLNEQLDLILSFIGVFTRKSETLSNGCNFRKSRGLILQDDLIICSDSITGLYHSERKL

SEQ ID NO: 747 - protein, 844 aa, synthetic construct
  REGION 1..844: note = MG44-362 effector
KVSKKDVKEALSRHYKTDISISSSGTLASGEKGVTSDDFHASLSSWIAFLDDRAFGIALLHDKKKQELAEKIIYDITIFEDKELRKKRLAKYSLSPNQIKYISSLRFSDWAKFSNKLLTGLTTERVNTDTGEVVNYSIRDLRWETDRNFRQILTAKEGKNYKFDFRNKIEKDNDAENETLDEIIGSLYASPRRKRALHQTIKVVLELKKKLKIDSFDAYFVESTRSEQEKKRTKSRKDKILEYYKGAAKKVQDEHELATWKKELDKKDENELKGKKLFLYFRQGCKSVYTGEPIDINSLNTDYDIDHIIPQAKVKDDSFLNTVLVEKTVNNTKQDQYPIPKSILTDKGIAWIKYLSAISPDRMPKEKKNRILRSVNKPLTDQEISGFVQRQLVSTNQSVKAVCEVLKKIDKRAKIVYSRANYVSDFRKVFDLTKSREANDFHHAHDAYLNIVVGNTYDKLFSTGDPEVIKHKREYRETLNRKPEYVFKHDARRLQTDTLIWKAKRYDEDGNEMADSIGTIDKVRKFLSYQDPLVTQRIFENVGEHGFFNHIHLHTAKDGNAAFPLKANGPFAKEGFETKYGGYSDLTNPYASLVRSEAGKGKHMYSLEFIPTIARKTLGKDKKALEKYLSEKNGLKNPEIIIEKLLRRTIIQIPYKAQNGKEGSVRLGISGKSGSTVICINVSEPHISAQYRKTIKKISKLLGLNDQAGQKTDTKVYEKYGNEDIPGKITRQEILDLFNYITKDIYCRPEFEGLPSLKSTILKVKSYNLEFQQLSTLNQRTCLAAMLKIISCKSAQRTSFEMIDSKTKNVGIILTSKNLSKGTKIIQTSVTGLTERVLFTVPED

SEQ ID NO: 748 - protein, 1601 aa, synthetic construct
  REGION 1..1601: note = MG44-363 effector
MENSNNSKKYYLGLDMGTDSCGWCVTDDKYNIIRSHKKTYGPDGKLIKKEGCHLWGARLFGPAKTAKNRRLNRTARRRLARRRRRIILLRELFQPEMDKIDPNFFRRLDQSNLWNEDKDKELQIEHNFLFNDKDLTDKEYYKDFPTIYHLRQAMVNGLPINGHYYDPKKQFDIREVYLVLAHMIKYRGNFLMEGDVQGSVVDPTYLKQCFDNIDNLIENSIDEDNADKEDDDKIISSEYCFNVDIKKADRLINLFKNESGKQNLKDSEKIEFGKNLTGIRQSLLSLINGSAVSLKDLLPKDQILDEEFGKNKIDFSKESFENDLDSYNLNDFYSQVLLEAKKIYDFRILAHLLHDNRFLCDAMVNVYKEHKEQLAALKRLYKKFATKEQYYFMFRDPKILGLGDSNGKNKKKSKVKNQPKASYVSYIGYTKTSGKRKYTGAHVTKEETIDDLIKQIKDDIGSSIGKYAKYIISKENAYKKDKKGKETLKVGAYKVRLSNNNPNNEETIFYTANDETLIGNEKKDNPYFSEDSKEKKDSVLIMKVLESKIRFLPRQNSRNNGVFPYQLNLNEMRTIIENQSKYYPFLKDKAPSFPDGKTEEYKIVSLLKFKMPYYIGPLSQPNNYVRDDKRDNHWVQFKGENNQGIINPWNFSQIVDMEGTADKFINNLTNYCTYIFGENTLPKESLIFQAYKVLNDLNNLKVNGSLISKEDKDYVIENVYLKKRKIKGKDILNALKHKYKDEPSITTKGSGKSIGEDEVDLTMFNSSLSSFIDLSDSNAFGPEFYKDSSKFELAEKVIELITIVEDKDLLKERLKKLGLSDNQVNFLSRKNYSGWASLSRKLLDGITIDCVNENTGEAYPVTIIDVMRDTSLNFMEIFETKNSQFSGFKEKVAELNDEKNICRDDLIDESYASPAMKRSVRQTFKVIDELKSTLKINHFERIFVEATRAPGEAGKMVKSRKKQLEVAYDAAKDLVDQELRDDLEKQTDDQLRRKKVYLYFMQLGKSVYSGEKIDLNELDKKYDIDHIIPQAKLKDDSFNNMVLVERELNNKKQDEYPIPSTIISEQGRNWILKLSNIKDKNKRFYLMPKDKTHRLLRPESKQLTSDELNGFINRQLTLTNQSVKAVCDILKMTEKGSEIVYSKANFVSDFRKLCGELRPSYDAFVKVRDINDFHHANDAYLNIVVGNVYYEKFKNFYINNRIDYDNNGKKDLSVLASKLFTKTQTDDKTGIVYWEAHFHNEKEADSNGKERTIKVRDEGTESTFDKIEHYMELNDPLVTQMRYTLSGKQGFFNKITLKAKAKKNEDNSDKLFPLKQHLRSDSNKVMDVNKYGGYSDMSNPYFMLVKSDGKKGEHIYSLESIPMICLKSFKNEKDKIEYLVKVNGLNNPVIIVDKLLMKSTLEIPQVSNDGNICGCTKLAFTGRTNNNVVLINLSELHLPLEWKKYYKKISNFYETNASAAEKKNHNFDVFEEQMKEDPTSDLKSGAIVLTQFDNKRFYSYLAGNVFAKAMYKGIPTIGSSFAKLKDKYEVFCNLNTLEQGKVLIGLIKLLSCKSVQGTDLSLIGLSENLGLISMSKTLEEGCSIVQESATGLNRFVIYVVE

SEQ ID NO: 749 - protein, 1425 aa, synthetic construct; identical to SEQ ID NO: 22
  REGION 1..1425: note = MG44-364 effector

SEQ ID NO: 750 - protein, 1387 aa, synthetic construct
  REGION 1..1387: note = MG44-365 effector
MEKNYYIGLDIGTNSVGWAVTDEKYSVVKKKGKRLWGVRLFDTAATAKKRRLKRTARRRYLRRRQRIDLLQELFAPLILERDENFFRRLDESFFFEEDKKVDGKYSLFSDKNYTDKDFYKEYKTAYHLRNRLIKGDIPDDPRIVYLACHHIIKKRGHFLFNGEINGNNISCVNEIRGLQKFVTDGNDHDVPMFGGDNFKDFSLDEFVKIITLTDTRRESIEKTTELFGVSDGKYLKNAVRVMFGYKQKVKTLFASEYYGDCDIEIDFTSEQYEETSEALKIELGDDYSYVDTLKNLYDFVVLKRLLKEHSSISEAMVSKYERHAVELRMLKNIVRKYGKTSDYNEIFKETVSDASYAKYIGMNKKGGVKQVTERESAYSYETFYKALLGKLDSIVTDKSDADYLCIKNRIENKDFLIRYASSVNASIPNQLHRDELNRILDNASVKFPYLLEKDGDGLSVKDKIMSIMTYKIPYYVGPIPNDENSEAIGKYSWLVRKESGKVLPWNFEKKVDMNASMEKFIKSLINRCSYLNTENVLPKQSLIYQEYEVLNELNGIKFNGKRIDNETKLKIFEGLFKNSGKKKITEKILKAFLVNENVVSKSDINALKIDGYQKDKEFSTCLSSYVNIVKALGNDFDRGYVDNNIDTFERIIELSTVYADNKSLFVEKLKQEFPALDERVIAKVKGLTFTKWGRLSKRLLVGVVASNTATGEVSNILSLMRNTNANFMEIIFDKEWNFNALIEEENKSVSRQIDKIKYSDIAELYCSPSVKRAIWQSIKIVREIVEIMGYPPTKFFVEVTRSDEDKKRTSSRKSVLQKLYKGVDDSGDIKAIKEALEKENENSLKDERLYLYYSQQGKCMYTGKPINIDDLLNTKLYDIDHIYPQSMTTDESVHRNKVLVCRSANKDKSDVYPLNIEVQNKMAGFWKSLRDKEFITPEKYIRLTRKEPLTDKELGDFIARQLVFTSQSVKEVINLLKIEYPNSETCYVKAEVVKDFRSRNNYLKIRTLNDLHHAKDAYLNVVAGNILSTANKNNFRMQRINKGNEIDTDIIKNYSISNIFSRGYVVSTAKNLAWNCDLFDNVEKQYYRNDILVTKMQTVGKGAFYDETVRKSLANAKYAKAARKASIPLKKVEGNRYSIERYGGVTTVSPRWFALIGCSDKKNNQIYRIEPITIYDYAKMDKSRIKDEMASLLERQGHKNVDIIAILKKNTLLSIDGNRYYLTGTSGESLTLDNAKQLTVGREYELAVNRILKYTENPKRNKDVTEVAIRSKSKEDYNIDEKAVFVMLVDKLKTEFPQFRVVASKFDDESIKAFDTASKSRQCEIITNIINMMGCNSTRGKLDGEPFNANFKASEGALTANKKVSYELTVIDQSVTGVYEYSKSIKK

SEQ ID NO: 751 - protein, 1386 aa, synthetic construct
  REGION 1..1386: note = MG44-366 effector
MAKQKILCGLDIGTNSVGWCVTDENNKVIKKQGKSLWGVRMFEEAKDSKERRGFRSSRRRLKRRKERLSLLQYLFSIPMNEVDASFFYRLSNSFYHNEDREHPFQYTLFNSVNYTDKQYYDEFPTIYHLRKHLLESKEKEDLRFIYLALHHMIKYRGNFLSEGTSFKPLDKESADSDFRALQALIEEESRFDGENISYDDTIFEELKIANKNIKRLGDLQDRFNELLNPLKNSFIKSNIIPLMLGKKIKIKNLKLEDSEEKLELKEICPADENYEDNVQLILASYPEEENLVEILLLLQKIYQFFLLGKLLGDHQYLCNAMVERYEKHHSDLKQLKAYIRKYHNEDYGRLFRKPRKKGEKEEANYSSYVGSYIVNGEEPCRFGRGGKQEEFFKLIKSILAQDNNQEAKDIIQSIDNKDYLPLLNSTSNGVFPYQLNLLEMKVILENQSKYYEFLNERDEDGTIADKIISLLTFKIPYYVGPLSTKASHSWIVRKEGKIYPWNFYRMVKKDDTAAEFIKRMLNRCSYLPSEYCLPKDSLIFTYYNVLSFLNKLQVNGDYLDYEEKMELISLFKAKRKVNVKEIENFFKHKNPGTEVSITTSNGKGLSNIACNMSSYYDFANIYSPEYVDSHTDEIEAIIQDIVIFEDKQILEERLKNTHGIEDISIIKKIKGLNYTKYGRLSKELLVGLKAANQETGELYGSILHIMEHSNMNLQEIIHAEEFNFQALIDDYNQAHSSSDKKDTIEGYVDTLYVNPGMRRGLIQAYKIIEELEKILKRPIDEFYVECSRQNKTKKGPNSSRKQQLIKLYKDAISATKDALEFKKLLNRLEEVDENQFQSDKFYLYFLQMGRCMYSGDPIELDSLFDTSKYDIDHIIPQSLIKDDSFTNRVLVKQELNREKTAVYPIQSSLLFHGDKSKAFAFYRYLKDMKLMSEDKFARLTRTQPLKDEEYAAFANRQLVFTNQAVAGLIGAIQYFKKDSDHMPRIIYSKAENVSDFRKVFELVKSRTANNFHHAHDAYLNIIVGRTLDSYFSPFKQNKDTIHQMHLEKKTTNPLKVFTSNYKVFDLSGNLVWDKENSLKEIRHQLYERYDILTTTRTYQGTTLFEKVTIYKKGEGNIGVKASGPLANASEYGGLEGFAFGFYTLIKTNKNYILEAIPTLFKNDIKEYLSTLYKEDYEIIVPILNINSVIMEGKKKYCITGKTGNQYVIKNLLERRFTYRELTIIHKLDKIQERLTKNKISLKGNETKEDLKKIGLYLKDNYLIVSIAKNKDVKQIELSNDECTELYDSLNNILNKEIYAYSASSTISTLLNEQRDYFEKSSIALKIKVLLNLLAYLKCNERKSVDLTLIYGKSKMGTLYLGKKIKPCKIIAESITGFYTKVIWEIK

SEQ ID NO: 752 - protein, 1501 aa, synthetic construct
  REGION 1..1501: note = MG44-367 effector
MSDKKYYLGLDIGTNSVGFCVTDETYNIIKKHKKVTYISEKKEEKNNKPNNKYYGNHLWGARLFDAASSAKDRRTSREARRRFRRRRERILYLQKEFSTERNKVDPYFFDRLNNSAIHIEDRDALLQEHHLLFNEPHFTDVEFFKKYPTIYHLRLARIEHPEQKFDIREVYLALAHMIKYRGNFLFKGTIPESGCDADRILNTFNELDSYLDEKERFCCTNEKASELLKVFQSETRVQDLHDKIQSIFPVEDKHNSFKNQRIYLIAGASRKTDAVFKDSPDIDFDIIDDEIQGVDICLGNADFEEKTLSAISEAIGDNNTKILLSLKKIFARRNIQRIIRGKKSISAAMVAIYNEHNKQLKVLKQLIKRYNPSYYSAFFRHADEIKLSSSQTNNKCSKTYKTYASYIGSTVLKGKRRRFNHDTTTPKELYSTIEYLLPISKIKPNKKGEEQNFKEKRPGDKKELLKIDTLISNDDYLLRQNSSENGVLPYQLNLNERRRIIENQSKYYPFLSNLDSDFSDPKNKCFRIESILKYKIPYYVGPLSPKATHNWVSMNNESHERITPWNFWDIVNQEKTEEAFIDFLKNYCSYLIHEPTLPKQSLVYQRFVLLNEMNTWQRNGIPLSTEDKEYLITNLYLKQRTITKLSTIEKALRIKYKTTDIKITTSGTTKGKGITDDDLHGTLSSWIDFSNEKAFGPELFHSKKIQEIAEITIKDATLFQDKKVKQERLKRFHLSPSQIKYRSNFRYKGWARLSNKLLTGIKISLPNEPYDYSILDLMWKKSLTLEEILKTKEEDNPKNYKYPFLLEIKKENGDDREDIDDILSRLHCSPKMERAIFQTIEIIKELKSTLHIKGFSEYFVETGRFTGEKKRTNSRKIKIENFYKGIEKQLSESDREGFQTLKGQLKEFTNTKLKKKKWYLYFRQLGKSLYTGKPIDFNNFENYDIDHIIPRARVKDDSFTNLVLVEKIRNKDKSNHYPFVNQYVDKEGIEFITFLNKANSKIRPDKKRNRILRTKELSNEEISGFVKSQLTTTDQSVNAVCKILNLIDKKARVVYSRASTVAEFRQLFGLVKSRDANDFHHAQDAYLNIVVGNVYDKEFSDGGVHVIAHKRDYMESLNRSVKYMFHHDERVLNKDTLIWKSKNYIIGKDGEEIEDPNSHGTIDIIRKYFSINDPLITRKMERKPTLLFSQNEIISARNGGAQFPLKQYKPFNSKGFETKYGGYSHLSNPYGMLVKSEGKNKKPIYSIEFVPSVYLGKHYSEIKVKKYLSENKKCKNPEICIKRLRFNTIIEIPCISSTGETGVLRVGLASGKTNGHQMGLINMTEPKIDNKYRCLIKSLSKLAAYDDSLIAESKDKQSSYEKYGMNDIDENPNEKIKRTDLEELFKYITEVLYKKPEFECLPKVSNTLLALETSLEEFKQLSTINQVHCLCSMLKIIQAKSVQQINFKKFADSNSNLTIFENLPKTCGDIVRNNELPSHAKIIQTSATGLTEWVLFEVPEN

SEQ ID NO: 753 - protein, 1411 aa, synthetic construct
  REGION 1..1411: note = MG44-368 effector
MEEQNTKKYYVGIDLGTNSCGWAVTDEEYNLRRLKGKDAFGARLFKEASVAKGRRTKRTNRRRMARRKFRIELLNSILGPAIENVDPNFLIRLKYSTFDVEDKRKASGKEINSYPLFPTKKQEKEFYKEYPTIWHLRLARIKGDEKAYSDIRYVYLALHHIIKYRGNFLWEEARNPQDDSKLNNVLDDLNLAILNLPKEEEENGNAELSHEKYQQLYTILTNHEGKKAQQKSIRSLLDISDENQKKYWDLFSKAVTGGKFSPLEQDEDDKTSFDFPHLSDDKLPECQEKMGDEFPIIDCAKKIYDFFTLKSLIGEHASEDPRSISASMVYTYDQHKQDLRAAKNALHAIDKKLGQFNAEGSYYYQFFKDPKAEHNYAAYVSVDSSIDRGKNKTNDDLIKEFQKLVKDNVDVINPEDWKILNAHINSANKDENTFMPLIAHVSTSVIPNQLHKNERMIILKNASKYYPSIFSDDTCNKIKQIFEYKIPFYYGPLAGEHSNVIRNDPNNNERITPYNIKDIVNDEKTRTNFRNKLTNNCSRLFGEPVRPKSSLDYEEYIILDRLNKILVNDHELSGKDKEDVLSYILSNGKTTKKNLVRHLALRYGRKDNDIRIAKMDADLPFTASTHAYLKKLGFDLVKDHDLLEDIILLATVYSENKYDLGNVLKAKYPQFSQKQISQLKARKTNKWGSLSRKFLTGLHPIDKDGVINDGTNILEIRRNTNQNLNEILYNSEYHYQDAIKIENDEYFNNTKVDKVQEVLDNTPAIFRRSCYQCLRILDEIKSITKADPEKIFFEVTRQDLLNKDKKKKDSRKEKLQAIYEQLKDLDKVPNVNKKLLLDNLNNSSIVDDKTLRGKHLYLYFMQLGLDLYTGKPIKIAEVLSGVTYDTDHIVPQSLIKDDSLDNLVLVNKEDNQKTKSDVYPIPKYIKTPEVVRLWKYLHEKKRMSDKKYNNLRRSTRLDEKEINGFVNRQINSVDYSNISLKDLVNIIYPNTTVVFSKAQYPSERRKEYHRPKLRELNDAHHARDAYLNIVCGNILSTEFSEKRLPMLYAQKKQEIEHKLADPSWNKDKSTVEKSFNMIKMLERHRVKDDMALAKKCQAVFNKHSALLTYALTYGDPSFYNANATSPKEKKGKYDTLVPIHTDPNSPYQNVAKYGGYDSAGTAYRYLVSYKTKKGKKEKHNLELLNVKYLYLSKYGKDEEALKKQLISDNELQNANDIKFLAKVYNGQKTIYRNSIFKIKPSNVSQISLENIYSIYMDDCFDDKELYTEYLKFWSKHIYLLQGLPIEQSELKVFTDKEQKNERIISKAKSLLILNRIKSISSQKYFLYGFFKKIQDITEEEFRSLSRSNQILALINLLLLFTSPDKAKPGDYISSFKTASFEYKPSLNLKADITLIYDSFTGLYSRKVTYKL

SEQ ID NO: 754 - protein, 1386 aa, synthetic construct
  REGION 1..1386: note = MG44-369 effector
MAKQKILCGLDIGTNSVGWCVTDENNKVIKKQGKSLWGVRMFEEAKDAKERRGFRSSRRRLKRRKERLSLLQSLFSIPMNEVDASFFYRLSNSFYHNEDREHPFQYTLFNSVNYTDKQYYDEFPTIYHLRKHLLESKEKEDLRFIYLALHHMIKYRGNFLSEGTSFKPLDKESADSDFRALQALIEEESRFEGENISYDDNIFEELKIANKNIKRLGDLQDRFNELLNPLKNGFIKSNIIPLMLGKKIKIKSLKLEDSEEKLELKEVCPADENYEDNIQLILASYPEEENLVEILLLLQKIYQFFLLGKLLGDHQYLCNAMVERYKKHHNDLKQLKAYIRKYHNEDYGRLFRKPRKKGEKEEANYSSYVGSYIVNGEEPCRFGRGGKQEEFFKLIKSILAQDNNQEAKDIIQSIDNKDYLPLLNSTSNGVFPYQLNLLEMKVILENQSKHYEFLNERDEDGTIADKIISLLTFKIPYYVGPLSTKASHSWIVRKEGKIYPWNFYRMVKKDDTAKRFIEEMLNRCSYLPSEYCLPKDSLIFTYYNVLSFLNKLQVNGKYLGYEEKMELISLFKAKRKVNVKEIENFFKHKNPGTEVSITTSNGKGLSNIACNMSSYYDFANIYSPEYVDSHTDEIEAIIQDIVIFEDKQILEERLKNTHGIEDISIIKKIKGLNYTKYGRLSKELLVGLKAANQETGELYGSILHIMEHSNMNLQEIIHAEEFNFQALIDDYNQVHSSGDKKDTIEGYVDTLYVNPGMRRGLIQAYKIIEELEKILKRPIDEFYVECSRQNKTKKEPTSSRKQQLIKLYKDAISATKDALEFKKLLNRLEEVDENQFQSDKFYLYFLQMGRCMYSGDPIELDSLFDTSKYDIDHIIPQSLIKDDSFTNRVLVKQELNREKTAVYPIQSSLLFHGDKSKAFAFYRYLKDMKLMSEDKFARLTRTQPLKDEEYAAFANRQLVFTNQAVAGLIGAIQYFKRDSDHMPRIIYSKAENVSDFRKVFELVKSRTANNFHHAHDAYLNIIVGRTLDSYFSPFKQNKDTIHQMHLEKKTTNPLKVFTSNYKVFDLSGNLVWDKENSLKEIRHQLYERYDILTTTRTYQGTTLFEKVTIYKKGEGNIGVKASGPLANASEYGGLEGFAFGFYTLIKTNKNYILEAIPTLFKNDIKEYLSTLYKEDYEIIVPILNINSVIMEGKKKYCITGKTGNQYVIKNLLERRFTYRELTIIHKLDKIQERLTKNKISLKGNETKEDLKKIGLYLKDNYLIVSIAKNKDVKQIELSNDECTELYDSLNNILNKEIYAYSASSTISTLLNEQRDYFEKSSIALKIKVLLNLLAYLKCNERKSVDLTLIYGKSKMGTLYLGKKIKPCKIIAESITGFYTKVIWEIK

SEQ ID NO: 755 - protein, 1393 aa, synthetic construct
  REGION 1..1393: note = MG44-370 effector
MKNNDETLKKLRLGLDIGTNSVGYALLDENNKLIKKNGHTFWGVRMFDEAETAKDRGSYRKSRRRLLRRKERMEILRSFFTKEICDIDPTFFERLDDSFYYKEDKKNKNTYNLFTSEYTDKDFYLEYPTIYHLRKAMQEEDKKFDIRMVYLAIAHIIKYRGNFLYPGEEFSTSDYTSIKQFFLDFNDILDELSNELEDNEDYSAEYFDKIENINDDFFKGIKKTLMETKGIANKKKELLDLFNVSKKSIYNELVIPFISGSAKVNISNLSVIKNSKYPKTEISLGSEELEGQVEEAISVAPEIKSVLEMIIRIKGISDFYFINKILSNSKTISESMVKMYKEHNEDLKKLKEFFKKYSEDQYNEIFKIRDEKLANYVAYVGFNKLRKNKVERFKHASREEFYGYLKQKLNNIKDTKAQEEIKYFIDKMDNNEFLLKQNSNQNGAFPMQLHLKELKNILNNQEKYYPFLKEIKDGYSVKQKIILTFKYKIPYYVGPLNKESKYSWVVREDEKIYPWNFDKVVKLDETAEKFILRMQNKCTYLKGDNDYCLPKNSLIFSEYSCLSYLNKISINGKSIDPIMKSKIFNEVFLTKKQPTKKDIIEFIKANYNADALTTTEKELPEVTCNMASYIKMKEIFGKNFNDNKEMIENIIKDITIFEDKSILGNRLKEVYKLNNDRIKQIKGLNYKGYGRLSKNLLVGLQIVDNQTGEIKGNVIEVMRKTNLNLQEILYLDGYRLIDAIDEYNRKNSLNDSYLCARDYIAENLVISPSFKRALIQTCSIIQEIERIFHKKIDEYYVEVTRTNKDKNKGKTTSSRYDKIKKIYSSCEELAMAYNIDMKRLKNELESNKDNLKSDILYFYFTQLGKCMYSLEDIDISDLTNNYHYDIDHIYPQSIIKDDSLSNRVLVDKKKNAAKTDKFLFEANVLNPKAQQFYKKLLSLELISKEKYRRLIQKEMSKDELDGFVNRQLVSTNQSVMGLIKLLKEYYEVDEKNIIYSKGENVSDFRHTFGLVKSRTANNFHHAHDAYLNVVVGGILNKYYTSRRFYQFSDIARIENEGESLNPSKIFTKRDILKANGKIIWDKKEDIRRIEKDLYHRFDITETIRTYNPNEMYSKVTILPKEKGENAVPFQITTPRVDVKKYGGIISNKFSRYVIIEAQSKKGIDTILEAIPKTACGDNNKIEKDIDKYIASLDEYQKYTSYKVVNYNIKANVVIQDGSLKYIITGKSGNQYVLQNIQDRFFSKKAMITIKNIDKYLNNKKLGILMAKDNEKIIVSPARGKNNEEIFLEKTELVNLLKEIKTMYSKDIYSFSIIQNIVNNIDCSIEYSIENFITICNNLLQILKTNERKNADLRLIHLSGNSGTILISKKLKSGMKFIWQSITGYYEEILYEVK

SEQ ID NO: 756 - protein, 1601 aa, synthetic construct
  REGION 1..1601: note = MG44-371 effector
MENSNNSKKYYLGLDMGTDSCGWCVTDDKYNIIRSHKKTYDPDGKLIKREGCHLWGARLFGPANTAKNRRLNRTARRRLARRRRRIILLRELFQPEMDKIDPNFFRRLDQSNLWNEDKDKELQMEHNFLFNDKDLTDKEYYKDFPTIYHLRKAMVNGLTINGHYYDPKKQFDIREVYLVLAHMIKYRGNFLMEGDVQGSVVDPIYLKQCFDNIDNLIKNSIDEDNADKEDDDKIISSEYCFNVDIKRANRLINLFKNESGKQNLKDSEKIEFGKNLTGIRQSLLSLINGSAVSLKDLLPKDQILDEEFGKNKIDFSKESFENDLDSYNLNDFYSQVLLEAKKIYDFRILAHLLHDNRLLCDAMVNVYKEHKEQLAALKRLYKKFATKEQYYFMFRDPKILGLGDSNGKNKKKSKVKNQPKASYVSYIGYTKTSGKRKYTGAHVTKEETIDDLIKQIKDDIGSSIGKYAKYIISKENAYKKDKKGKETLKVGAYKVRLSNNNPNNEETIFYTANDETLIGNEKKDNPYFSEDSKEKEDSVLIMKMLESKIRFLPRQNSRNNGVFPYQLNLNEMRTIIENQSKYYPFLKDKAPSFPDGKTEEYKIVSLLKFKMPYYIGPLSQPNNYVRDDKRDNHWVQFKGENNQGIINPWNFSQIVDMEGTADKFINNLTNYCTYIFGENTLPKESLIFQAYKVLNDLNNLKVNGSLISKEDKDYVIENVYLKKRKIKGKDILNALKHKYKDEPSITTKGSGKSIGEDEVDLTMFNSSLSSFIDLSDSNAFGPEFYKDSSKFELAEKVIELITIVEDKDLLKERLKKLGLSDNQVNFLSRKNYSGWAPLSRKLLDGITIDCVNENTGEAYPVTIIDVMRDTSLNFMEIYETKNSQFSGFKEKVAELNDEKNICRDDLIDESYASPAMKRSVRQTFKVIDELKNTLKINHFERIFVEATRAPGEAGKMVKSRKKQLEVAYDAAKDLVDQELRDDLEKQTDDQLRRKKVYLYFMQLGKSVYSGEKIDLNELDKKYDIDHIIPQAKLKDDSFNNMVLVERELNNKKQDEYPIPSTIISEQGRNWILKLSNIKDKNKRFYLMPKDKTHRLLRPESKQLTSDELNGFINRQLTLTNQSVKAVCDILKMTEKGSEIVYSKANFVSDFRKLCGELRPSYDAFVKVRDINDFHHANDAYLNIVVGNVYYEKFKNFYINNRIDYDNNGKKDLSVLASKLFTKTQTDDKTGIVYWEAHFHNEKETDYNGKERTIKVRDEGTESTFDKIEHYMELNDPLVTQMQYTLSGKHGFFNKITLKAKAKENEDNSGKLFPLKQHLRSDNDKVMDVNKYGGYSDMSNPYFMLVKSDGKKGEHIYSLESIPMICLKSFKNEKDKIEYLVKVNGLNNPVIIVDKLLMKSTLEIPQVSNDGNICGCTKLAFTGRTNNKVVLINLSELHLPLEWKKYYKKISNFYDTNASAAEKKNHNFDVFEEQMKEDPTSDLKSGAIVLTQFDNKRFYSYLAGNVFAKAMYKGIPTIGSSFAKLKDKYEVFCNLNTLEQGKVLIGLIKLLSCKSVQGTDLSLIGLSENLGLISMSKTLEEGCSIVQESATGLNRFVIYVVE

SEQ ID NO: 757 - protein, 1395 aa, synthetic construct
  REGION 1..1395: note = MG44-372 effector
MDNNKKLFIGLDVGSDSVGWAATDEDYNLCRLKGKTAWGARLFTAASDAKGRRALRVSGRRLARRKRRINLLNTLFDPLLKEVDPTFLQRLEYSTLQNDDPNKPESTRSDTLLFLDKKKEKEFYKAYPTIWHLRRDMINGDEKAFSDIRYLYLAVHHIIKYRGNFLREGEINTDQFDVAEFGILNDLIGQAVGSTDDDGDEMTFAGIPESNYELFVKTALDKSKGKSQRKKELIALTDSGGNEFAKGLLEMFCTLAVGSEFNTKKLNLKNEDPRFEEIKISIDKKYDENEANYHDALDDLFGVVEIAKAVYDFCDLHDILKGQPNLSSAFACIYDSHKDQKKALKDICKEIDEAEGNLGKKGEGVLFRVFKDPNNENNYCAFTHNNSTKGRCEVHAFDQYVLSEIEPKEELIIKNRAPWAQLKTLIALDEMMQTVAIRSTSVIPMQLHKKELVAILNNAIKFNVPGILDIRDQLIELFSFRVPYYCGPLNTKSAFTNMVLKNGVSGPINPWNYKDKIDFEATKKKFMMGLTNKCTYLKDCSVLPSSSLLFRDAMAWDKLNNLRVNGNRLSPDEMKRIYNELVVRRPKTTLSQAKNFIVKHMSGEPSKSGDYVVTGWNDQDAIDNSPRAVLTSAFHLTDDRNTPEYQMCEDIIYLKTVFTDSEKDAMEAIAKKYSLNGDQLTAVKKLKCKGWATLSKEFLTLSSDKTCVEPNRLIDVMMAGEGNMMEVLHSPKYEFNAKVDRYNTALFEGRDKDDAVEEIVESIPPKMRRSVIQAIRIVKEVSKVAKKDPTVISIEVTREDNDQDKKKKKVTKSRKDQLDEFLKGLVAGEKKNKGNDSSLKEAASDVRELLQDYGIDELRGKHLYLYFLQCGIDLYTGEKIDIQRILDGSSYDTDHILPQSLIKDDSLDNLVLVNRATNQHKSNSYPLPPSIQSKMKPTWRRLRDAGMLSAKKYANLTRTTPLTESELNSFVSAQINVVNHSNVAIRDALKVLYPRATLIFSKAQYPSQVRKELSIPKLRDLNDTHHAVDAYLNIVCGDMLTKAFGRMEIIKKAMKSMDEEGEPKASLNMEKFISRSLASKDGVLTDLANKIVANSQRHDFLLTYRFIYQDAEFYKQTIYGTNNSRNLKAETLIPIHDGMDPRKYGGYNEMKAEYNCVATVRGVKKTTRFLVGVPHLLAEQHRQGVDVNDRLIELVPHKISDAVTVDLDHPLPLMALVNAGGLEYLLIGYGEKQVKLLPFTPVFLSLDDASYIENLARYVDKRPELMANNGGTKTSCLTISRNRYSSEEIVFSNDSSLKVLDGLLELSNQSRFDYCTMVTEIRNEQKANELRNKLLESCFADQLKIIQSTLGRFTRRAEQLTGGKVFLKGRGVITSEGLIIVSKSITGLYQTEKKL

SEQ ID NO: 758 - protein, 1337 aa, synthetic construct; identical to SEQ ID NO: 44
  REGION 1..1337: note = MG44-373 effector

SEQ ID NO: 759 - protein, 1366 aa, synthetic construct
  REGION 1..1366: note = MG44-374 effector
MADKLFIGLDVGSDSVGWAATDENFRLYRLKGKTAWGARIFSEANDAKGRRGFRVAGRRLARRKERIRLLNVLFDPLLKEKDPTFLLRLENSAIQNDDPNKPAQAVTDCPLFVNKQEEKDYYKRYPTIWHLRKALMENEDHAFSDIRFLYLAIHHIIKYRGNFLREGDIKIGQFNYSIFDRLNETLAVLFDSQNEDDKNEESCFIGLPKSQYEGFIACANDRNLPKKTKKEKLLSMFEKTEESKAFLEMFCTLCAGGEFSTKKLNAKGEETYQETKISFNSSYDENEGTYQEILGDFFDLVDIAKAVFDYCDLSDILNGKNDLSSAFVELYESHKSQLSALKSICKKIDSQNGFVGENSIYVKLFNDPNDKSNYPAFTHNKTLVDKRCDIHTFDKYVMDAILPYESLLAGKDTINWQMLKSLAEQDRLLQTIALRSTSVIPMQLHQKELKLILKNAISRNIKGIAEIEDKILKLFQYKIPYYCGPLTTKSNYSNVIFKNNEYRPLKPWDYEEAIDWDETKKGFMEGLTNKCTYLKDKPVLPKQSILYQDFDTWNKLNNLKVNGNKPSLEELNDLFSFVSQRSKTTMRDIQRYLKSKTNSKENDAVVSGWNPEDYICCSSRASFAKNGVFDLIHPDINNPKDLNKCERIIFLKTIYTDSPKDADATVLKEFPDLTNNQKALLKTIKCKEWSPLSKEFLELRYSDKYGEIRQSIIDLLRNGEGNLMQILAKYDYQEVIDACNAASFQTKSKSQIVSDLIEEMPPKMRRPVIQAVRIVQEVSKVAKKEPDQISIEVTRENNDKEKKQELTKKAKSRSTQIQNFLKNLVKIDTSEKKQADEVLEELKKYSDQSINGKHLYLYFLQNGKDAYTGKPINIDDVLSGNKYDTDHIIPQSKMKDDSIDNLVLVEREINQHRSNEYPLPESIRKNPANVVFWRKLKKAGMMSEKKFNNLTRTNALTEEELGAFVAAQINVVNRSNVVIRDVLKILYPNAKLIFSKAQYPSQIRKELNIPKLRDLNDTHHAVDAYLNIVSGVTLTDRYGNMRFIKASQDEEKHSLNMERYISSLIQIKEGQKTELGELIDQTSRRHDFLLTYRFSYQDSAFYKQTIYKKNTSLIPVHDNLSPDKYGGYDSMSTEVNCVATIIGKKTTRYLVGIPHLLIKKAKNGIDVSNELIKLVPHKENEVVKVDLNATLQLDCTVKKDGFTYLCISKNAACVKLKPFSPVFLSRESEIYLSNLIKFVEKYPNIANKEMDFELKTNRTGESTIIFSRKIFKRVLEELVTLSNQSRFDYCPMISKLRDFVFNEQSQETTLGEQLEIIRSFIGVFTRRSETLSNKVAFFKSRGAILQEGLLLCSDSITGLYHSERKL

SEQ ID NO: 760 - protein, 1414 aa, synthetic construct
  REGION 1..1414: note = MG44-375 effector
MAKKYLMGLDLGTDSVGWCVTDENNHIIKKGGKSLWGARLFDEAQDCKSRRANRAARRRTQRRAERIDLLQILFKEEVDKVDKNFFLRLNESFYKPEDKSEPIRNDNNYLFVDKDFNDKDYKKKYPTIYHLRKALYETNEKMDIRLIYLALAHMIKYRGNFLYEVENFKPSDIETVKSLLPKINEVLDELGEDKLKLEDGYASEFNEKVLKARGITGKKEALAELFGKGRYLSNVVYPLMAGGKLATKKIFEPEDDGEIDPKDFTFSSADADEKLEKLSELFPNDLHIELLGLIRGIYDYLLIGKLLGDSTTLSEAMVKRYEEHKKDLKDLKKYVKTHLSMADYNEIFRLKRESNYVAYVGSTNSSEGKIRCSHCDRDAFYKYIKEKLGIDKIKKAESIEDPTLREIYEKIEDKTYLARQNSTDNGVFPYQLNKTELRKILETQSKYYPFLNKKDEYGTTIDKIESLLTFKIPYYVGPLFAGDEGNVRGSHSWVVRNSKEKIYPWNFKYVVNQDESAEKFIKRMLNRCTYLPDCYCLPLNSLLFQRYQVLSLLNKTMINGALISKKDKDGLIEGVFKKNMSVSKKKILEYFTKNYAEDVSVTTSNGKELEEVNASMSSYVFFSNALGEDFVKNNEDKIESIIKDLTIFEDSKIIEKRLKSNYGLNPEQIKKIKGKRLTGWGRLSKELLEMTTDYSNEYGEVLSISLIDLMERTNFNLMELINDDSFDFKKKIEEENQKVDYNFASKKEKHQAIVDFVDDCYVSPGMKRPLIQAMAIIEDVEKIIGHPIDEYYVECTRSNKAKKGAKDSRQKDLIKKYDEARKLTMSAMIKESFDMAYKELKGETDLGKFRSDRFYLYLTQMGKCAYTLQDIDLAELFNEQAYDIDHIVPQSLVKDDSIENRVLVKAEANRSKMNHYPIPASVKAPGANAFYKMLLKAKLIGEKKYSNLTRTTELSDDDLLAFVNRQLVYTNQAVKALVDVIKTFQKDKKGNTPKVVYSKAENVSDFRRDYDIIKVRDANHFHHAHDAYLNICVGRTVNTYFGDIRQRILEKYKGIDRTMNVKKIFECENGVSKKPILDSDGNVVWDYSSSLKEIKKNIYERYDVLTTTMQYIKGGQLTDATIYPAKDGKTDGLLPVKGNGPLSNPSIYGGKKGINYSFYSLVEIDSKNKKQYKIIPIPLLYADGSNESEIEKYLADILMLDVSKIIVPVLKVNCILKSGQSKICITGKSGERLIVKNLTELYFSKEDLKTIKNISKLSDEFAKRGLSLSTSTKEKVMTEFSFDENKIILSPASGPNSKPVELTNSELSVLYLTLIRKSRSPILDLMSAVKKIGFFLDGDIIKSKFESLLIWQKAYILSQVIQFFTVCVSSIDLSLLGGSAGVDRTKISYNLPSNLSVVVESPTGFYSKVLWKGQ

SEQ ID NO: 761 - protein, 1396 aa, synthetic construct
  REGION 1..1396: note = MG44-376 effector
MDNNKKLFIGLDVGSDSVGWAATDEDYNLYRLKGKTAWGARLFNAASDEKGRRGFRVSGRRLARRKRRINLLNTLFDPLLKDIDPTFLQRLEYSTLQNDDPNKPTSARSEALLFLNKEQERSFYKTYPTIWHLRRDMINGDEKAFSDIRYLYLAVHHIMKYRGNFLREGDINTDQFDLAEFGLLNDLIAQAVGSTDDDGDEMTFAGISESNYDLFIETALDKSKGKSQRKKELIALTDSGGNEFAKGLLEMFCTLAVGGKFNTKKLNPKNEDPRFEEIDIVIDKKYDENEANYHGVLDDLFDVVEIAKDVYDFCDLHDILKGQPNLSSGFSCIYDSHKTQKKALKDISKEIDEAEGNLGKKGEDVLYRIFKDPDNDKNYCAFTHNDSTKDRCDIHAFNQYVLGEISPKEELIVKNRLQWAQLKELIALDEMMQTVAIRSTSAIPMQLHKKELVAILNNAIKFNVPGILEIRDQLIELFSFRVPYYCGPLNAKSDFTNMVLKNDASGPINPWNYNDKIDMEATKKKFMAGLTNKCTYLKDCSVLPSSSLLFRDAMTWDKLNNLRVNGNRLSPEEMKRIYNELVVRRPKTTLSQVKNFIVKHMGGEPSKSGDYVVTGWNDQDAIDNSPRATLTATFHLTDDRNAPEYQLCEDIIYLKTVFTDSEKDALDAIKKKYSLNGEQLNAVKKLKCKGWATLSKEFLALSSDKACAEPNRLIDVMAAGEGNMMEVLHSPKYEFNAKVDRYNAALFEGRDKDDAVEEIVENIPPKMRRSVVQAIRIVKEVSKVAKKDPAVISIEVTREDNDQDKKKKKVTKSRKDQLDEFLKGLVFGEKKAKGNDDSLKEAASDARELLQEYGIDQLRGKHLYLYFLQCGIDLYTGEKIDIQRILDGSSYDTDHILPQSLIKDDSLDNLVLVNRATNQHKSNSYPLPLEIQCKMKPTWRRLRDAGMISAKKYANLTRTTPLTESELNSFVAAQINVVNHSNVAIRDALKVLYPRATLIFSKAQYPSQVRKELSIPKLRDLNDTHHAVDAYLNIVCGDMLTRTFGRMEIIKKAMETMNEEEEPKASLNMEKFISRSLASKDGEVTDLANKIVANSRRHDFLLTYRFLYQDDAFYKQTIYGPNNSSGLKTDALIPMHDGMNPARYGGYSAMTTEFNCVATIRGPKKTTRYLLGVPHLLAEQRRQGADISDRLIALVPHKPTETVDIDLKHPLPLWSIAKIAGIEYLIGSYGDVIKLMPVSPIFLSPKSADYVDKLIRYVEKRNDLMSSNGGLFGETTLEVPGNRFSTNKIIFSNSQSLLVLDELLKISRLPCYDYCSMVAELRDETKQDALRQRILTSSFLEQLEIILSVFGVFTRKSEALSNRKNFRKSRASILSTDGFSIVSKSITGLYQTEKKL

SEQ ID NO: 762 - protein, 1063 aa, synthetic construct
  REGION 1..1063: note = MG44-377 effector
KKLKKFVKDNYKEKYNSIFRDLDKNNYVNYIGSNITKNIKNNISHISNDVFYSFLKKELNIDKYKVTEKNKNDYISEILIDMESNNYLPRLNSTDNGVFPYQLNLMEMQIILENQSKFYPFLLTKDDYGTTIDKIISILKFKIPYYIGPLVMPKGNDEYSKFSWIKRTEEKIYPWNFDKIVNKNESAKVFIQRMLTKCSYLPTEYCLPKDSLIFSYFNVLQVLNKTFINRSVINVNDKLNIIHELFMKKRKVAKKNLIEFIKAKYGEDCTISTSNNKEIEEINANMASYNDFVNIFGAEFVNNNVDLIEKIILDIVIFEDKSILVDRLKNIYKLPDDKIKLIKGLTYSKYSNISKTLLTDIKYFDENGEIKKSIIKIMEETNQNLQEVIFNEKYNFQTLIDQYNKQNMPNDKINNIENYVKELGTISPGMKRPLIQAFKICEELEKIVGQPINEYYVECTRSNKQEKKRKNSRLQNLKNLYKEAEQTLKDDPYYQRALKELNNCEESKFQSDKYYLYFSQLGKCAYSGEPIDISELFNTDKYDIDHIIPQSMIKDDSLENRVLVKQELNRSKSDQYPISQSILFKGNYGQAYKYYELLYKAKLIGNKKFHNLIRLGELSEEELSSFVNRQLVSTNQAVKGLIGAIKYFKETDTFKPKIIFSKGEIVSDFRKEFDIVKSRNVNNFHHAHDAYLNIVVGRTVETYFSPYLQNKETLQIMHANKLTTNPINIFKNKDNKKKNIFDKQGNLVWDYQNSLSIINKTIFNRFDILTTTRTYYGTNLLKKVTVYKKGEGNIPVKTSNCLSDVSKYGGFTGYAFGSYCLIKVKNEFIIIAIPTMYKNNINEYLHKSNYNNYEIIINNLKINTVLTSNNKKYAITGKTGDRYLLMNLKERIFDKNSIKTMKKIEKVISKLTEKRVSVTGKETIDEINNYFSLKNNTDLVVSPAANNKANEIILTNDELISLYNYFIALFSKEIYSYSASISISNNLLSNKDIFNELSIFGKIKLLFNLCDFLKCNERKAIDLSLIGQSKNSGVLYQGNKMSNCSIIYESITGFYRKVAYKID

SEQ ID NO: 763 - protein, 1378 aa, synthetic construct
  REGION 1..1378: note = MG44-378 effector
MEKKYYIGLDLGTSSVGWAATDENYNFLRLKGKTAWGARIFSEAVDCKGRRSFRSSKRRVARRKYRLLLLKNLFAEEMAKVDKTFFLRLENSTYWVEDKAKDDKGNDLGKTLIFKTTEEEREFHKAYPTTWHLRKKLVDNDEQALSDLRLVYLAIHHIMKYRGNFLSDGTKDNEEPSKDTIDRINVILNLLEAKDNESGISDNITYLSKESYNELIETLEDKNLNKTKKQDKIKKLFKNVDKTNEDIKVYIDLFKTLVTGGVFSVKKINEEYDKLKIDFNNGFDDNANEISKALGDAYELVLIAKAYNDYISLKDLLGGNPYLSYVMADIYDEHKKDLRSLKEILISIDNKLGNEGNNRIYNLVFKPVIVPKEERKDKDGKKNKKLTTPNYASFIQGDDVEKKSVTLENLNKNIKEILEANKQYVDEIDKEEFDRLLDKASNNELFKKQATVSTSLIPHQCHLKELNKILENAGEKYPFIKENSDKIIQLFKFRVPYYYGPLNNESKEHAWIVKNEGKERTKITPWNIDEVVNKEKTREGFFKKLTNSCTYLVGETVLPKVSLVYEKYLALERLNKMQVNGNYLNHSDKMDLLNYVLGNSNTTIENIRKKLASDTGMKINDIVISNIKNNVPFTATSHAFFRKRFNLENSKEFELCEEVIKYATIYADDKKELKKFLSENFSFDEKLIKEIANLQTNKWGRLSKKFLCGGAKDEMYYTDENGVMYTILDLLEETNQNLQEIVNSGKYGFDEKIKEFNDALTKDETIDEQISKILEGTPALMVRSITQTIKVVDDVIKAAKCEPKKIIMEVTRTDEKKGQEVASRYIQLKKKISEDKGIDDKEREELLSDLEEANKTKKLKGKHLYLYFSQLGIDLYTGKKMKIEEVLEGKYDIDHIVPQSLIKDDSLDNQVLVNKKYNQDVKKDIYPICDEIRSKMLNLWYNYKERGIIKEEKYNRLIRTTELTDDEINDFVKRQINVVNYSNVQIKRIFELKYPDTEIIFSKAGFPSLLRKEYEIAKMRDLNDAHHAVDAYLNIVCGDILTSLYTDVFYLIKRKKEKKENPTFNMERRLLGYIKKNDLMNKIKSNCLRHDALITFKPDYDSGMFYKQTIFKKSGDKETGLIPLHTKGPMSDVKKYGGYSSLSQSYILAVEYKVKKKTVKKLLRIPTMYIKLYGEDLNTIAKLMIDDEKAINIKILRKICLNQKVRFNNCYYLIYTSDDTRCKLKMAYQNYIDNDALVYLNKCLKKIDELDDKDKTEQEIIVNKDGDKLKITKEENLKIFKLIKEQYSKSIYNSITYIVKSRDILEDSFNNLSIKKQIDTLFNMIKILSRSNEDAKFDESLKNGGIKYYRISMNIDNNQIYIVNESPSGLFKGKEELI

SEQ ID NO: 764 - protein, 1465 aa, synthetic construct; identical to SEQ ID NO: 46
  REGION 1..1465: note = MG44-379 effector

SEQ ID NO: 765 - protein, 1428 aa, synthetic construct
  REGION 1..1428: note = MG44-380 effector
MEEQNTKKYYVGIDLGTNSCGWAVTDKNYKLMRLKGKDAFGARLFSQASSSKQRRTKRTSRRRMARRKFRIQLLNSLLGPAVEKVDSDFLIRLQYSALDKEDKKKYSGRDIKSYPLFPTKQKEVEFYKKYPTIWHLRLARIKGNPDAFSDIRYVYLALHHIIKYRGNFLWEGKMNPQDDSQMDVVLNDLNKVIEDLCSTEGEDSDDAIEIAQISPDKYKDFYKILENHEGKVAQQKAIKALANPQDDIQKKYWDLFAKSVTGGKFSPLEQDEDDKTSYDFAHFDDEKLAECQDKMGEAFSIIEKSKQIYDFFVLKSFIKERKDGDPLSISSSMVFAYQQHHDDLLAAKHALHAIDKKLGTYNATDSLYYKFFKDPKGEHNYPAYVGVDSIATKKRSGNKTNEELIKTFNNLIKENTDVIAKEDWEILNAHINNTNKDDNTFRPRIAHLSTSVIPHQLHENELDSILTQASNYYPEVFTSERKSKIKAIFKYRIPFYFGPLYGDKHSNVIRKDPNNHERITPFNIDDIVNKEETRKKFMNSLTNSCAYLFGETVRPKSSLDYEEYIILDRLNKIQVNDHELTGDEKKEVLDYILGRGKTTKANLVHHLAIVRNRKLDDIRVSKMDGKLPFTATSHAYFKKAGYDLVKDHDRIENVILLSTIYAENKSELKEAIKNNYSEFTDKQIKQLAAFKTNKWGRLSRKFLTNFHPVDKDGVVNDGSNILEIRRTTNQNLNEILFNPEYNFQELIKQSNDGYFDKTNKNKVDDILDNVPAVFRRSCNQCLLILKEIKNAAKGAPEKIFFEVTREDLKQKDKKRKDSRKDQIKAIYKQLKDLTSEFSQIDLGELNKQLNAEQIIDDKLRGKHLYLYFRQLGRDAYTGKPIKLEEVLNGTKYDTDHIIPKSLIKDDSLDNLVLVNREDNQNTKSDIYPIPSQIKTGFVLKFWHYLHEKKMRSDKKYNNLRRNTRLTEKEIHEFVNSQINAVNYSNKALKDLVEEIYPNTKVVFSKAQYPSERRKEYHRAKLRELNNAHHARDAYLNIVCGDILSTEFSDIRTIYARKKRELEQKRKDPNHSKDDKGEKTFNMVATLKRHRGYNDGALAKQCQEVYHKHSALITYALDYADPSFYNEKITSPKKKGDKANKLIPIHTKEGSPYLDTTKYGGYDSSGTCYRYLVSYSEQKGKKNKKALKFLNVKNYRIAESKSDEELLRKQLVTINELTNVKDLKFLAKVYNSQKVKYENCVFVLSTNTFDRFSAYNAYEIYLDGEFVENKTIETYAEYLKNSKKYLSYLPSDATKSSLQIKVNRFSEDEKSPKAHILTFSKEKNLTLFNTIRSIANTKSKSGKSVFEHYFTSKLKDFSEEEFKAKDLKNQSAILLARISVFQDSSDDSILTYYPKFKMDIRKSLNISEPITLIYDSVTGLYSKSKTYKV

SEQ ID NO: 766 - protein, 1402 aa, synthetic construct; identical to SEQ ID NO: 43
  REGION 1..1402: note = MG44-381 effector

SEQ ID NO: 767 - protein, 1366 aa, synthetic construct
  REGION 1..1366: note = MG44-382 effector
MDNNYFLGIDLGSNSIGYAVTDEEYNLLKLKEKSAWGARLFDEANSAKERRSIRSSRRRMARRKYRIYLLNHFIFGKEIEKVDKTFLLRLNESNLVLEDKSKENGTKYPLFLNKKEEKEYYHKYPTIYHLRKAQINNEPDSFKDIRYLYLSVHHIIKKRGNFLSEGDFNPDSPLTNEMLDLANNVISNLLKDYFGEDFSDSPLIFSEEAAKEVMVIVLDENSTSREKKSKIKETFIKRIDAGLYKSAKKSFDEIIDLFANTVTGGTKKIDDVQISFNNNYEEKRAEYESVLADKILILDISNAIYNACYIKKTLGEEKYFSFAMVNEYNRHKKDLRLLKDGIAKKLGKDIYHKMFDSNYKEEKDSESKVPSYAKFIESSSAYKYKDAKGYFAFIQNLKDWLNALLKDEKVKGDEELVLNINKALNNINDNSFLKRLSDINNSTFPHQFHEKELDIILNNAKKYFPFLNENDNISKIKSIFLYRVNYYEGPLDTRSIYSNVVKIGDTNEKIYPWNKEQIIDKNKTRINFISKLINECTYLMGEKVLPKNSILFTDFVILNKLNALVINGNKISQEVKKELFDFIKNRNKTSINDIKKFLMNRYDIYKKDGVSLSKIDLEVKYAFVSPIRPLLKDSFNLEDYNVIKEIDEKIIKTLTIYSEDKKEALETIYSMMNLNDAQKKAIKKINCKDWATLSEKFLTYRFPDKNGVISSSIFEILYNSVSTLQEVLNSKEYEILETIEKLNNEFAGNISRKNKIESLINSAPPMTRRPIIQALKIAYDIKKITKKCPTKIMIETTRSNDNEKKRTKSRRENILDFLNAIKSDQEECFGVAIQNLTSELASIEDGLLDAESIYLYFKQLGIDVYTGKKIDLMDVIKTNKYDIDHIVPRSLIKNDSLENKVLVDKVYNENIKSNFYPVPQSIYEQNLPLWKYLLSKNLFSEDKYNALIRRTPLTQEEINQFIARQINVVNYSNIVLRDVFKIAFPETKLIFQKAENVNFLRNEYNLVKIRNLNDTHHAVDAYFNIVVGDLLDKFYTKNHFISEHYDKKLTFNPESIIKMYFAANTQKLELMKRVYEQKDMILTIREKYSDGDFYDQNITAKPSISGQKELVPVHTNSPLVNVSIYGGRNNLGRSYFVVGKNDKGKKVMISVPIMYLNIKDKELLNEKLCTLYSGKNKNIKFDFSNKLFNNSVVTFENSEKNEKYLISLNNKICCLITPLIPLFLDHNSLLYLKIIERRFDAVKRIVSLNKGLNEIVFKRNKKGQNPDYISKDRNLYLKAVILKELEKSERNFSRDKENIRKVKNDYLNDEFDGLDLGEQIKKIIDSIDFFNRTTGNFRLAMDKFINLKPILIKTSPSGIIEKRIKL

SEQ ID NO: 768 - protein, 1445 aa, synthetic construct
  REGION 1..1445: note = MG44-383 effector
MDKKFYLGLDIGTDSVGWAVTDENYNLIRKQGKHLWGARLFPEASDASTRRSNREARRRLQRRRWRIVLLQELFNDEMNKVDPNFFARLNNSALLESDKEEKDRTPYLLFNDNGYTDKNYMKKYPTIYHLRQEMINNPDHQYDIREIYLVMAHMIKYRGNFLTDGEISSEGIENNTQNIVSAFTDLDNELRELLEDGEDFVPFDCTEDIAKKLLSVFEKETRSRYLADEILKEFGKSDFSTLQKNLIKLISGSKMQVGALYPRIKEEDEEISKTSLELDSDNLEETLNKLAETLTDSEIAIINTCYSLYSFRILINLLKGKHYISDAMVEVYNTHREQLKILKALVKRYNPSEFNHFFVKYLEKDGKGYRKNYVNYIGMTQKGRHKIRLPHSTNQEDLYKAIKSLLPFDKLNDETFPWQDDDKKKMQDILTALEAKAYLPRQNAKENGVFPYQLNKNEMNKIINNQKKFYPFLGETSADYFNPNKQSYKLISLLEFKIPYFVGPLSNKMTKDDEDKESNFWMERKQEGKITPWNFHEMIDEDKTAAGFIERMKNACTYIIGEATLPKCSLLYSEYMLLNEINNWTINNQGLTKEVKEYLIENLYTKSSRTPTLRNIEECLKCYYKQSVEVLTKTGKELKSEDIHANLKSFVDMADDRAFGPEFYKDQKKYDLAEEVIFTITMFEDKDLKKKKLESLKLTPVQIKYFMGLKYKDWGKLSKKLLNGLTTELTNTSTGEIFDYTVIDLMRDFPLNLMEILETNDSEYTFREQISKLNQKTMPGRESLIESSYASPAMKRAVRQTFKIIDELKHILHIDHFDTFFVECTRREDQKNVRKSSRKKQLQELLANIKLEELADKDDLEKLLENKSEADLRRKKLFLYFMQMGRSVYTGEIIDLNRLDKDYDIDHIIPQAKLKDDSFLNTVLVEKDINNRKQDTYPLPSNVLTEKGREWVKKLNGLKGKDKTFQLMPADKMNRILRPTTKPLEDEELVGFVNRQLTMTDQSVKAVCEILRETEKESKIVFSKASNVSEFRSVFGLTKCREINDFHHANDAYLNIVVGNVYDKVFTSRFTVKLFQDHFKDHRSWKIDVKNFFKRDEYAFSPINAGKCVWKAKHYQDDKKEIEDDTSTGTIDLVRKTLSWNDPMVTQMLFTQRPDQGFFNHISLHSAKSGDAKFPLKLKAPFNSEGWEKKYGGYSDLSAPYFMLVESDGKKGEKKYTLENIPSIFLASMKTEEEKLKFLTENYKLKNPKIVLDKLLIRTVIEFPHDDGKVKVGISGKSDNSIVLVNLSEPAIPKTSDLKYLKAISKLLDVNSKAGKEKDNSYLSNKNSMIVNGIELNKENNCKLFNCLLDNVFNKTMYTQLPEVGGKIQKLINSKDAFASLSFLDQLNIIIESLKLCNCKKFKAELKTIGLGSISIMRINKELPHPFRIIRQSPTGFYEKVLFEK

SEQ ID NO: 769 - protein, 988 aa, synthetic construct
  REGION 1..988: note = MG44-384 effector
YIGYTSKDGRKIKVKKCKDEDFFKYLKKYLNGILNEDNFDIVSKIIKEIDDRIFLPKILHSDNGLFPKQVNEFELKKIIENMVRNYAETEEMASAVLSLFNYKIPYYVGPLTGCNSWVVRTDEKVTPWNFDRVVDLAKSNEAFMRRMTNKCAYIKGEDVLPKASIIYQKYDTLNQLNKLRINDRVISIELKQTIYNELFLKYPKVTDKKIKELLVREGLCSSSETKDITISGKDGDFKSSMSSYIRLKNILGDFVDDDLKSGGKVCENIILWHTLNTDKKIVEDLIEKNYGFIPEIKANIKQLKGLTFNDFGRLSAKLLIGIEGVDKTTGQILTIMDVLYQTNQNLNEVLNNESYNFSEIIDEENGIETEIISYETVEELYVSPAVRRGIWQTLLMIDEYVNAVGRQPDKIFIEVTRNDGKKGDNGRTQPRKRQLQEKFKNIGSAYSDIIEELSEEKYTDLKLRQERLYLYFRQLGRCMYTGERIILDELNGNRYDVDHILPRTYVKDDSLDNKVLVCRGANATKADTYPLPTEFSRKEVRAHWKMLLDKDLISKTTYDRLTRIEPLKDDDYNDFINRQKTITDQTAKAVIELLKRKYPNAKLIFSRAKNVNDFKNRFNLFKCRETNDLHHARDAYLNVVVGNVFDSVFSTPLGQSRKDGDVWRIYNLKKLFTRDVIGVWSKDSIKIVKDTYSKPSMSVTRYATCNKGKFYDETVCRKDDSAITAPRKGKGPLSDVTKYGGYTTQKTAYFAIVTSVDKKGKSIKTIEAIPVLVTYKLKTDTNAIQKYLESYLREPIIVIPKVKVKQLVSYNGSLCYLAGITNNQITVHNASQLYTDNTTDEYVNQLIKIIGMGDNGIITGNESQYITKTNKDGVIRIVVNKENNEKLYETLKNKLDSKIYKGLSAFASFKKNMERGKDKFCELSVLEQAKVLLQILKVFRCNAEISDIQAIGGTAHSGKKLFAKNITDVDFKLVNLSPAGLTVRIRKV

SEQ ID NO: 770 - protein, 1332 aa, synthetic construct; identical to SEQ ID NO: 122
  REGION 1..1332: note = MG44-385 effector

SEQ ID NO: 771 - protein, 1337 aa, synthetic construct; identical to SEQ ID NO: 77
  REGION 1..1337: note = MG44-386 effector

SEQ ID NO: 772 - protein, 1378 aa, synthetic construct
  REGION 1..1378: note = MG44-387 effector
MEKKYYIGLDLGTSSVGWAATDENYNFLRLKGKTAWGARIFSEAVDCKGRRSFRSSKRRVARRKYRLLLLKNLFAEEMAKVDKTFFLRLENSTYWAEDKAKDAEGNDLGKTLIFKTTEEEREFHKAYPTTWHLRKKLVDNDEQALSDLRLVYLAIHHIMKYRGNFLSDGTKDNEEPSKDTIDRINVILNLLEAKDNESGISDNITYLSKESYNELIETLENKNLNKKKKQDEIKKLFKNVDKTNEDIKVYIDLFKTLVTGGVFSVKKINEEYDKLKIDFNNGFDDNADEISKALGDAYELVLIAKAYNDYISLKDLLGGKPYLSYVMADIYDEHKKDLKSLKKILVSIDYKLGNEGSNRVYNLVFKPVIVPKEERKDKDGKKNKKLTTPNYASFIQGDDVEKKSVTLENLNKNIKEILEANKQYVDEIDKEEFDRLLDKASNNELFKKQATVSTSLIPHQCHLKELNKILENAGEKYPFIKENSDKIIQLFKFRVPYYYGPLNNESKEHAWIVKNEGKERTKITPWNIDEVVDKGRTREGFFKKLTNSCTYLVGETVLPKVSLVYEKYLALERLNKMQVNGNYLNHSDKMDLLNYVLGNSNTTIENIRKKLASDTGMKINDIVISNIKNNVPFTATSHAFFRKHFNLENSEEFELCEEVIKYATIYADDKKELKKFLSENFSFDEKLIKEIANLQTNKWGRLSKKFLCGGAKDEMYYTDENGVMYTILGLLEETNQNLQEIVNSGKYGFDEKIKEFNDALTKDETIDEQISKILEGTPALMVRSITQTIKVVDDVIKAAKCEPKKIIMEVTRTDEKKGQEVASRYIQLKKKISEDKGIDDKEREELLSDLEEANKTKKLKGKHLYLYFSQLGIDLYTGKKMKIEEVLEGKYDIDHIVPQSLIKDDSLDNQVLVNKKYNQDVKKDIYPICDEIRSKMLNLWYNYKERGIIKEEKYNRLIRTTELTDDEINDFVKRQINVVNYSNVQIKRIFELKYPDTEIIFSKAGFPSLLRKEYEIAKMRDLNDAHHAVDAYLNIVCGDILTSLYTDVFYLIKRKKEKKENPTFNMERRLLGYIKKNDLMNKIKSNCLRHDALITFKPDYDSGMFYKQTIFKKSGDKETGLIPLHTKGPMSDVKKYGGYSSLSQSYLLAVEYKVKKKTVKKLLRIPTMYIKLYGEDLNTIAKLMIDDEKAINIKILRKICLNQKVRFNNCYYLIYTSDDTRCKLKMAYQNYIDNDALVYLNKCLKKTDELDDKDKTEQEIIVNKDGDKLKITKEENLKIFKLIKEQYSKSIYNSITYIVKSRDILEDSFNNLSIKKQIDTLFNMIKILSRSNEDAKFDESLKNGGIKYYRISMNIDNNQIYIVNESPSGLFKGKEELI

SEQ ID NO: 773 - protein, 1347 aa, synthetic construct; identical to SEQ ID NO: 154
  REGION 1..1347: note = MG44-388 effector

SEQ ID NO: 774 - protein, 1376 aa, synthetic construct
  REGION 1..1376: note = MG44-389 effector
MDNYYIGLDLGSDSVGWAATDENYNLLKLNRKSAFGARIFSAANGCVERRSFRSSRRRMARRKYRIHLLNELLCEEISKTDDTFFLRLSNSMYKLEDKKHLGKSLLFKSIDEEKQFNKLYPTIWHLRQKLIYDDEIAFSNIKNVYFALHHIIKYRGNFISENDISSKGFNYERLNDLNNVLKSSLENEDDEPIFDGDIIYGTSENWSKIESILSNKELNAKNKQKQLKELFNYKNKNDLIDLFIIIVTGGKKKFNDIDICFNDSFDDKEDEIQASLGEQYDVVLIAKEMFDYIYVKKLMGEHKYLSDSMVDLYDKHARDLKLLKSLIKKLDLKLQLTDKKSNYYAIFKKNKIDEDNKKQQNNEEDKNSNKNKKGLNNYPSYVGHNSCETKCNIEDFNDTIKKLIIDNKQALEEIDLDTTKYILEQVENKTFLKTIASYTTSAIPHQLHENELKVILKNAKSRYPTIFANDLNEKIIKLFLFRVPYYYGPLNSESPYSNLEKKDKYAKVYPWNVNEIIDDNKTRQKFMAKLTNKCQYLEECNVLPKSSLLYEEYMILDRLNTMIVNGERLNHELKDKLYKEIISKKKTTLANIQKLLSKVYNFNENEVIISGVNLDVAFEAVTHYTLSKEFDLPKDYKMLEELINYSTIFADDKKELERFIRSNYSFLSDAQIKCIKSLGTKKWASFSRELLDGITVADELGEVNTIIGFMRNQSKNFQEVLNGYGFNKVIDIKNREFRGDKTKSKIIKEKLDAVPAIFRRTINQTLLILDDIVSVAKKEPSKIFVEVTREDLKNKDKIESKKRRKELEEFLKSIKNDKEYYYKQAHELLEELNDERISDLRLKGKHLYLYFKQLGLDLYSGEKINIEDVLNSDKYDIDHIVPQKLIKDDSLDNMVLVNREANQKIKKDTYPLPLSIRNEKTKSIWKYLVEKKAITQKKYDNLVRDTEITDSELSQFINRQINNINASNKVVKDIINIKYPNTDVIFSKAQYPSFIRKEYRIVKVRELNDAHHAVDAYLNIVSGNILYTTFSNMSMIMVRKKINDISQDDNKEKTDNMESVIKYNFKKNNLLDRVKKTCFRKDALITYKCDFVNSGFYDMTIYKAENNLIPIHTKKDNPMNDVTKYGGYSSAKSSKLALIEYTKGKKVVRKINAVKPIYEKMYSNDEDKFLKIIANDDKAQNIKLLRYIPINQKIIYDGGYYLLLNNNETRNKLKLIYQNYIDNDLLYYFTKAKKLIDIEDNEAHPEQLEQKIITSRNGKPFVISKEKNLEVMKALYNNAFNKVYDSSRTILDLRNDVILDIFESQTLSKQLEIILDSMIFMSRNYNSSELYNTKKYKCFEKLIKTNTNLVSKNISNNKIYLIHDSPSGLYSYKEKI

SEQ ID NO: 775 - protein, 1333 aa, synthetic construct; identical to SEQ ID NO: 137
  REGION 1..1333: note = MG44-390 effector

SEQ ID NO: 776 - protein, 1064 aa, synthetic construct
  REGION 1..1064: note = MG44-391 effector
MAKKYLMGLDLGTNSVGWCVTDENNHIIKKGGKSLWGVRLFDEAKDCKTRRANRATRRRTQRRAERIDLLQLLFKEEVDKVDKNFFLRLNESFYKPEDKSEPIRNDNNYLFVDKDFNDRDYKKEYPTIYHLRKALYETNEKMDIRLIYLALAHMIKYRGNFLYEGQSFKPSDIKTIESTLPRINEILTELGKDEELNLNDEYASKFNQKLFEASGVEEKKQALSELFGKGKYLSSVVYPLMAGGTRKTKVIFELDDDEEIDPSDFAFSTADADEKLEKLSEIFPNDLRLELLKLIKVVYDYVLLGKLLGDSNTLSEAMVKRYEEHNKDLKILKKYVKDHYSKADYDDIFIKSGDQKEHTNYVMYVGSVVTKGKRQRYAHCSRDNFYKFIKKKLGIDKYKNAKDIEDETLSKIFSKIEDKSYLPRQNSTDNGVFPYQLNKTELEKILETQSKFYPFLNVKDENGTTIEKIESLLTFKIPYYVGPLLAGTDGNPRGVHSWVARNSAEKIYPWNFEKIVDKDQSAERFIKRMLNRCTYLPDCYCLPLNSLLFQRYQVLSLLNKTMVNGMLISKEDKDGLIEKLFKKKPSVTKKDIKNYFDKPGEDVSVTTSNGKELEEVNASMSSYVFFSNALGEDFVKNNEDKIEDIIKDLTIFEDSKIIEERLKKVYKLSPTQIKKIKGKRFSGWGRLSKELLEMTTNYSNEYGEVFSISLIDLMERTNFILMELINDDSFDFKKKIEEANQKVDYNFANKKEKHQAIVDFVDDCYVSPGMKRPLIQTMAIIEDVEKIIGHPIDEYYVECTRSNKAKKVRKEDRRKKLMALYKKHAKELLASSMTNKSFERVEGELNDDYYADKYRSDKFYLYLTQLGKCAYTLEDIDLAELFSNSAAYNIDHIIPQSLVKDDSLENKVLVKMTKNEDKTDIYPIPSSVKAAGANAFYKMLLKANLIGKKKYENLTRTSQLTDADLLSFVNRQLVYTNQAVKALVDVIKMFQNDKQGNAPKVIYSKAENVSDFRRDFGILKVREANNLHHAHDAYLNICVGRAVNTYFGDIRQRMIEKSGILKKL

SEQ ID NO: 777 - protein, 1334 aa, synthetic construct; identical to SEQ ID NO: 172
  REGION 1..1334: note = MG44-392 effector

SEQ ID NO: 778 - protein, 1342 aa, synthetic construct
  REGION 1..1342: note = MG44-393 effector
SDKDFYNRYPTIYHLRLARLEHPEQKFDIREIYLTLAHRIKYRGNFLHEGERSSIGSDPQTVVALFNDIDTLFASINENEDEPLYLPFNCTEDIAKALIEIFKTTTKKGDLSDKRNAAFKQTNSKTDFRCKAISLIAGSDKKLSDLFPEIDWEEQGDSAIVKVDFGSEDFDTKLIPSCGTLIGDEKTNLLLKLKQIYDLRILANLLKGEAYVSKAMVAIYARHQEQLATLKERIKRYNPSHYSEFFRKTEEVDPKNTKKVKRKAIDNYVNYIGFTDVKGNKLRIAHAVAADDRYKKIASLLPLDAAGKEDFVEKVPGDKEKLLRIKKSIEDKTYLLRQNSKENGVLPYQLNLNERRIILKNQSQYYPFLGEMDKDFNNPEKQAYKIESILKYKIPYFVGPLSNKATHSWVIKKSDEKITPWNFHDIIDEEETANKFIENLKNYCTYLINEPTLPKESLVYQRFVLLNERNRLKVNGTPIMLDDKKYLIENVYLKQRKVNKKTIEDALSLRYKCKVTLTSSGTTATGEKGVTNEDFHASLSSWIALRDNRAFGRELLHDKKKQELAEKIIYDITIFENKELRTKRLEKYNLTPNQIKYIANLSFQGWANLSNKLLTGIYTERVNQSTGEVFDYSIMDLRWETNRNFRQILTTKEGKNYKFDFRNQIEKENDSDNETLNDIINSLYASPMRKRALHQTIDIVLELKKVLKIDHFDSYFVESTREAGEKKRTKSRKDKILEAYKAAAKKVQDDAEIEKWEKQLTDRTDDELKGKKLYLYFRQGCKSVYTGEPIDIHSLNTDYDIDHIIPQAMVKDDSFLNTVLVEKKVNNTKSDQYPIPKSILTEKGINWIKYLSSINPDLMPKEKKNRILRSVNKPMTDEELSGFVQRQLVSTNQSVKAVCEVLKKIDKDAKIVYSKAGNVSDFRKVFDLTKSREANDFHHAHDAYLNIVVGNTYDKLFSTGDPKVIKYKREHREARNRSLEYIFKHDVRMRYTDTLIWKAKKYTEGWKGDEIKDSVGTIDTVRKYLSYQDPLVTQRRFEQVGKQGFFNKISLHTAKEGGASFPLKLKGPFAQEEYAEKYGGYSDLTNPYASLVRSKGKKDKHIYSIEFIPTIVRKSLEKDKEALEKYLAENNGLIEPEILIEKLLIRTILQIPYKAENGKEGYVRLGISGKSTNGLSCINLSEPYISSEYRKTIKKISKLLDLDSQAGKKKDSSIFDKYGINDIPNKITREELLSLFKYLIEDVYCRPEFEGLPTTNVSIKKLKSSFHSFTGFSTADQRKCLSRMVKLISCKSASGTDLSRIDAKMKKAGSIQPNNVLQKGTKIIQSSVTGLYERVLFTVPED

SEQ ID NO: 779 - protein, 1601 aa, synthetic construct
  REGION 1..1601: note = MG44-394 effector
MENSNNSKKYYLGLDMGTDSCGWCVTDDKYNIIRSHKKTYDPDGKLIKREGCHLWGARLFGPANTAKNRRLNRTARRRLARRRRRIILLRELFQPEMDKIDPNFFRRLDQSNLWNEDKDKELQMEHNFLFNDKDLTDKEYYKDFPTIYHLRKAMVNGLTINGHYYDPKKQFDIREVYLVLAHMIKYRGNFLMEGDVQGSVVDPIYLKQCFDNIDNLIKNSIDEDNADKEDDDKIISSEYCFNVDIKRANRLINLFKNESGKQNLKDSEKIEFGKNLTGIRQSLLSLINGSAVSLKDLLPKDQILDEEFGKNKIDFSKESFENDLDSYNLNDFYSQVLLEAKKIYDFRILAHLLHDNRLLCDAMVNVYKEHKEQLAALKRLYKKFATKEQYYFMFRDPKILGLGDSNGKNKKKSKVKNQPKASYVSYIGYTKTSGKRKYTGAHVTKEETIDDLIKQIKDDIGSSIGKYAKYIISKENAYKKDKKGKETLKVGAYKVRLSNNNPNNEETIFYTANDETLIGNEKKDNPYFSEDSKEKEDSVLIMKMLESKIRFLPRQNSRNNGVFPYQLNLNEMRTIIENQSKYYPFLKDKAPSFPDGKTEEYKIVSLLKFKMPYYIGPLSQPNNYVRDDKRDNHWVQFKGENNQGIINPWNFSQIVDMEGTADKFINNLTNYCTYIFGENTLPKESLIFQAYKVLNDLNNLKVNGSLISKEDKDYVIENVYLKKRKIKGKDILNALKHKYKDEPSITTKGSGKSIGEDEVDLTMFNSSLSSFIDLSDSNAFGPEFYKDSSKFELAEKVIELITIVEDKDLLKERLKKLGLSDNQVNFLSRKNYSGWAPLSRKLLDGITIDCVNENTGEAYPVTIIDVMRDTSLNFMEIYETKNSQFSGFKEKVAELNDEKNICRDDLIDESYASPAMKRSVRQTFKVIDELKNTLKINHFERIFVEATRAPGEAGKMVKSRKKQLEVAYDAAKDLVDQELRDDLEKQTDDQLRRKKVYLYFMQLGKSVYSGEKIDLNELDKKYDIDHIIPQAKLKDDSFNNMVLVERELNNKKQDEYPIPSTIISEQGRNWILKLSNIKDKNKRFYLMPKDKTHRLLRPESKQLTSDELNGFINRQLTLTNQSVKAVCDILKMTEKGSEIVYSKANFVSDFRKLCGELRPSYDAFVKVRDINDFHHANDAYLNIVVGNVYYEKFKNFYINNRIDYDNNGKKDLSVLASKLFTKTQTDDKTGIVYWEAHFHNEKETDYNGKERTIKVRDEGTESTFDKIEHYMELNDPLVTQMQYTLSGKQGFFNKITLKAKAKENEDNSGKLFPLKQHLRSDNDKVMDVNKYGGYSDMSNPYFMLVKSDGKKGEHIYSLESIPMICLKSFKNEKDKIEYLVKVNGLNNPVIIVDKLLMKSTLEIPQVSNDGNICGCTKLAFTGRTNNNVVLINLSELHLPLEWKKYYKKISNFYETNASAAEKKNHNFDVFEEQMKEDPTSDLKSGAIVLTQFDNKRFYSYLAGNVFAKAMYKGIPTIGSSFAKLKDKYEVFCNLNTLEQGKVLIGLIKLLSCKSVQGTDLSLIGLSENLGLISMSKTLEEGCSIVQESATGLNRFVIYVVE

SEQ ID NO: 780 - protein, 1417 aa, synthetic construct; identical to SEQ ID NO: 118
  REGION 1..1417: note = MG44-395 effector

SEQ ID NO: 781 - protein, 1428 aa, synthetic construct
  REGION 1..1428: note = MG44-396 effector
MEEQNTKKYYVGIDLGTNSCGWAVTDKNYKLMRLKGKDAFGARLFSQASSSKQRRTKRTSRRRMARRKFRIQLLNSLLGPAVEKVDSDFLIRLQYSALDKEDKKKYSGRDIKSYPLFPTKQKEVEFYKKYPTIWHLRLARIKGNPDAFSDIRYVYLALHHIIKYRGNFLWEGKMNPQDDSQMDVVLNDLNKVIEDLCSTEGEDSDDAIEIAQISPDKYKDFYKILENHEGKVAQQKAIKALANPQDDIQKKYWDLFAKSVTGGKFSPLEQDEDDKTSYDFAHFDDEKLAECQDKMGEAFSIIEKSKQIYDFFVLKSFIKERKDGDPLSISSSMVFAYQQHHDDLLAAKHALHAIDKKLGTYNATDSLYYKFFKDPKGEHNYPAYVGVDSIATKKRSGNKTNEELIKTFNNLIKENTDVIAKEDWEILNAHINNTNKDDNTFRPRIAHLSTSVIPHQLHENELDSILTQASNYYPEVFTSERKSKIKAIFKYRIPFYFGPLYGDKHSNVIRKDPNNHERITPFNIDDIVNKEETRKKFMNSLTNSCAYLFGETVRPKSSLDYEEYIILDRLNKIQVNDHELTGDEKKEVLDYILGRGKTTKANLVHHLAIVRNRKLDDIRVSKMDGKLPFTATSHAYFKKAGYDLVKDHDRIENVILLSTIYAENKSELKEAIKNNYSEFTDKQIKQLAAFKTNKWGRLSRKFLTNFPPVDKDGVVNDGSNILEIRRTTNQNLNEILFNPEYNFQELIKQSNDGYFDKTNKNKVDDILDNVPAVFRRSCNQCLLILKEIKNAAKGAPEKIFFEVTREDLKQKDKKRKDSRKDQIKAIYKQLKDLTSEFSQIDLGELNKQLNAEQITDDKLRGKHLYLYFRQLGRDAYTGKPIKLEEVLNGTKYDTDHIIPKSLIKDDSLDNLVLVNREDNQNTKSDIYPIPSQIKTGFVLKFWHYLHEKKMRSDKKYNNLRRNTRLTEKEIHEFVNSQINAVNYSNKALKDLVEEIYPNTKVVFSKAQYPSERRKEYHRAKLRELNNAHHARDAYLNIVCGDILSTEFSDIRTIYARKKRELEQKRKDPNHSKDDKGEKTFNMVATLKRHRGYNDGALAKQCQEVYHKHSALITYALDYADPSFYNEKITSPKKKGDKANKLIPIHTKEGSPYLDTTKYGGYDSSGTCYRYLVSYSEQKGKKNKKALKFLNVKNYRIAESKSDEELLRKQLVTINELTNVKDLKFLAKVYNSQKVKYENCVFVLSTNTFDRFSAYNAYEIYLDGEFVENKTIETYAEYLKNSKKYLSYLPSDATKSSLQIKVNRFSEDEKSPKAHILTFSKEKNLTLFNTIRSIANTKSKSGKSVFEHYFTSKLKDFSEEEFKAKDLKNQSAILLARISVFQDSSDDSILTYYPKFKMDIRKSLNISEPITLIYDSVTGLYSKSKTYKV

SEQ ID NO: 782 - protein, 1334 aa, synthetic construct; identical to SEQ ID NO: 21
  REGION 1..1334: note = MG44-397 effector

SEQ ID NO: 783 - protein, 1392 aa, synthetic construct
  REGION 1..1392: note = MG44-398 effector
MKNNDETLKKLRLGLDIGTNSVGYALLDENNKLIKKNGHTFWGVRMFDEAETAKDRGSYRKSRRRLLRRKERMEILRSFFTKEICDIDPTFFERLDDSFYYKEDKKNKNTYNLFTSEYTDKDFYLEYPTIYHLRKAMQEESKKFDIRMVYLAIAHIIKYRGNFLYPGEEFSTSDYTSIKQFFLDFNDILDELSNELEDNEDYSAECFDKIENINDDFLEKLKVILMEIKGISNKKKELLDLFNVSKKSIYNELVIPFISGSAKVNISSLSVIKNSKYPKTEISLGSEELEGQVEEAISVAPEIKSVLEMIIRIKEISDFYFINKILSDSKTISESMVKMYDEHQEDLKKLKDFFKKYAKGQYNAVFRKRDEALANYVAYVGFNDVNSKTKRFKHASREEFYGYLKQKLNNIKDAKAQEEIKYFIDKMDNNEFLLKQNSNQNGAFPMQLHLKELKNILNNQEKYYPFLKEIKDGYSVKQKIILTFKYKIPYYVGPLNKESKYSWVVREDEKIYPWNFDKVVKLDETAEKFILRMQNKCTYLKGDNDYCLPKNSLIFSEYLCLSYLNKISINGKSIDPIMKSKIFNEVFLTKKQPTKKDIIEFIKANYNADALTTTEKELPEVTCNMASYIKMKEIFGKDFNDNKEMIENIIKDITIFEDKSILGNRLKEVYKLNNDRIKQIKGLNYKGYGRLSKNLLVGLQIVDNQTGEIKGNVIEVMRKTNLNLQEILYLDGYRLIDAIDEYNRKNSLNDSYLCARDYIAENLVISPSFKRALIQTCSIIQEIERIFHKKIDEYYVEVTRTNKDKNKGKTTSSRYDKIKKIYSSCEELAMAYNIDMKRLKNELESNKDNLKSDILYFYFTQLGKCMYSLEDIDISDLTNNYHYDIDHIYPQSIIKDDSLSNRVLVDKKKNAAKTDKFLFEANVLNPKAQQFYKKLLSLELISKEKYRRLTQKEMSKDELDGFVNRQLVSTNQSVMGLIKLLKEYYEVDEKNIIYSKGENVSDFRHTFDLVKSRTANNFHHAHDAYLNVVVGGILNKYYTSRRFYQFSDITRIENEGESLNPSKIFTKRDILKANSKVIWDKKEDIKRIEKDLYHRFDITETIRTYNPNEMYSKVTILPKEKGENAVPFQITTPRVDVKKYGGIISNKFSRYVIIEAQSKKGIDTILEAIPKTACGDNNKIEKDIDKYIASLDEYQKYTSYKVVNYNIKANVVIQDGSLKYIITGKSGNQYLLQNVQDRFFNKKAMITIKNIDKYLNNKKLGILMAKDNEKIIVSPARGKNNEEIFLEKTELVNLLKEIKTMYSKDIYSFSAIQNIVNNIDCSIEYSIEDFITICNNLLQILKTNERKNADLRLIHLSGNSGTLYLGKKLKPGMKFIWQSITGYYEEILYEVK

SEQ ID NO: 784 - protein, 1455 aa, synthetic construct; identical to SEQ ID NO: 88
  REGION 1..1455: note = MG44-399 effector

SEQ ID NO: 785 - protein, 1366 aa, synthetic construct
  REGION 1..1366: note = MG44-400 effector
MDNNYFLGIDLGSNSIGYAVTDEDYNLLKLKGKSAWGARLFDEANSAKERRSIRSSRRRMARRKYRIYLLNHFIFGKEIEKVDKTFLLRLNESNLVLEDKSKENGTKYPLFLNKKEEKEYYHKYPTIYHLRKAQINNEPDSFKDIRYLYLSVHHIIKKRGNFLSEGDFNPDSPLTNEMLDLGNNVISNLLKDYFGEDFSDSPLIFSEEVAKEVMVIVLDENSNSREKKSKIKETFIKRIDDSLYKSVKKSFDEIIDLFANTVTGGTKKIDDVQISFNNNYEEKRAEYESVLADKILILDISNAIYNACYIKKTLGEEKYFSFAMVNEYNRHKKDLRLLKDGIVKKLGKDIYHKMFDSNYKEEKDSESKVPSYAKFIESSSAYKYKDAKGYFAFIQNLKDWLNALLKDEKVKGDEELVLNINKALNNISDNNFLKRLSDINNSTFPHQFHEKELNIILNNAKKYFPFLNENDNISKIKSIFLYRVNYYEGPLDTRSIYSNVVKIGNTNEKIYPWNKDQVIDKSKTRFNFISKLINECTYLMGEKVLPKNSILFTDFVILNKLNALVINGNKISQEVKKELFDFIKNRNKTSINDTKKFLMNRYDIYKKDGVSLSKIDLEVKDAFVSPIRPLLKDSFNLEDYNVIKEIDEKIIKTLTIYSEDKKEALETIYSMMNLNDAQKKAIKKINCKDWATLSEKFLTYRFPDKNGVISSSIFEILYNSVLTLQEVLNSKEYEILETIQKLNNDFAGNISRKNKIESLINSAPPMTRRPIIQALKIAYDIKKITKKYPTKIMIETTRSNDNEKKRTKSRRENILEFLNAIKSDQEDCFGVVIQNLTSELASIEDGLLDADSIYLYFKQLGIDVYTGKKIDLMDVIKTNKYDIDHIVPRSLIKNDSLENKVLVDKVYNENIKSNFYPVPQSIYEQNLPLWKYLLSKNLFSEEKYNALIRRTPLTQEEINQFIARQINVVNYSNIILRDVFKIAFPEAKLIFQKAENVSFLRNEYNLVKVRNLNDTHHAVDAYFNIVVGDLLDKFYTKNHFISEHYDKKLTFNPESIIKIYFASNTQKLELMKKVYEQKDMILTIREKYSDGGFYDQNITAKPSISGQKELVPVHTNSPLANVSLYGGRNNLGRSYFVVGKNDKGKKVMISVPIMYLNIKDKKVLNEKLCALYNGKNKNIKFDFSNKLFNYSVITFENSDKNEKYLISLKDKVCCLITPLMPLFLDYESILYLKIIQRRFDTIKRIASLNKDLNEIVFKRNKKGQNSDYISKDKNVRLKEMILKELEKSKRNFSREKENIIEIKTKYLNENFENLNLSLQIESIFKAINLFNRQEGRFRLSMDKFINLKPILIKTSPSGIIEKRIKL

SEQ ID NO: 786 - protein, 920 aa, synthetic construct
  REGION 1..920: note = MG44-401 effector
RVPYFVGPIGESENGWIRKDKSADFKPWTLDKIIDLDEAENRFIQNMTNKCTYLPTEDVLPQKSLLYSKFRVLNELNNLKINGNAIAVETKQQIFDGLFKKTPKVSTKKLVEFLKQNNIINKNDSNVVFTGIDKEFANDYSSYVTFATKFGEKFVNKNLEVFEKIIKYHTIISDKSRLAKRIKREFNIFSDEDIKFLKSLNFSGWGSLSQKFLEGLKFSDKKSANPEMETLTVMSALWETNKNLQEIIFCKTYDLQQKLDANIQKIQRDLLYDDIQNMYTSPAVKRGTWQAISIINELKNKLGKYPDKIFVEVTRNNQEKGEAGRKDSRHKMVVKKYKDKQLKLDCQKLCIEFNKLMEELNQKDNSNLRSEKLYLYFMQLGKDIYTGKPIDISQLNNDNMYNVDHIIPRCKVKDDSIDNKVLVSAAANLAKSDNYPVDGHIQASQKAFWELLRENGLMTDSKLARLQRTEEFTEKDADNFTNQQLVSTNQESKAVIDLLSKVYSNKRNIIFSKAMFVSDFRKNFNINKSRDVNALHHAQDAYLNVVVGNVLFNRFTEGYWKKNTQENNNQTEDKNANTTSVVEKLFRRTVWSNQTGEVVWKGQQSIDLVRKNCEKNSPCISIMPYENKNGMFYNATVYKSSKNHSATPASFVLKAKGPLSSIDKYGGYNSLKNAYFIAVESVGANGSVNKTIETVPIIVEYQYRNDANKTQKIIEYIEKTNNIKITKVIKDKIKYRSLLKIDGGLYMLTAKTNDSLKLLKLNQWFLSNKDIGYIKILEKYQNMPATIKELLKTTDEEIIVSPAVKTNSKQLAISRTNNVYLYDLIVAQLGKKIYNLSSISGLVKKLTNARSVFLSLSISAQAELLLGLVKYVGGAYNVDLALLGESQYAGSTTIGKNISNLNISLIEQSVTGLYAKETVL

SEQ ID NO: 787 - protein, 1118 aa, synthetic construct
  REGION 1..1118: note = MG44-402 effector
KYPKTEISLGSEELEGQVEEAISVAPEIKSVLEMIIKIKEISDFYFINKILSDSKTISESMVKMYDEHNEDLKKLKGFFKKYAEDQYNEIFKIRDEKLANYVAYVGFNKLRKNKVERFKHASREEFYGYLKQKLNNIKYAEAQEEIKYFIDKIDNNEFLLKQNSNQNGAFPMQLHLKELKTILNNQEKYYPFLSEGNDGYSIKEKIILTFKYKIPYYVGPLNKESKYSWVVREDEKIYPWNFDKVVKLDETAEKFILRMQNKCTYLKGDNDYCLPKNSLIFSEYSCLSYLNKLSINGKPIDPIMKSKIFNEVFLIKKQPTKKDIIEFIKTNYNADALTTTEKELPEATCNMASYIKMKEVFGKDFNDNKEMIENIIKDITIFEDKSILGNRLKELYKLNNDRIKQIKGLNYKGYSRLSKNLLVGLQIVDNQTGEIKGNVIEVMRKTNLNLQEILYLDGYRLIDAIDEYNRKNSLNDSYLCARDYIAENLVISPSFKRALIQTCSIIQEIERIFHKKIDEFYVEVTRTNKDKNKGKTTSSRYDKIKKIYSSCQELAMAYNFDMKRLKNELESNKDNLKSDILYFYFTQLGKCMYSLEDIDISDLTNNYHYDIDHIYPQSIIKDDSLSNRVLVDKKKNAAKTDKFLFEAKVLNPKAQQFYKKLLSLELISKEKYRRLTQKEISKDELEGFVNRQLVSTNQSVMGLIKLLKEYYKVDEKNIIYSKGENVSDFRHTFDLVKSRTANNFHHAHDAYLNVVVGGILNKYYTSRRFYQFSDIARIENEGESLNPSRIFTKRDILKANGKVIWDKKEDIKRIEKDLYHRFDITETIRTYNPNKMYSKVTILPKGEGESAVPFQTTTPRVDVEKYGGITSNKFSRYVIIEAHGKKGLDTILEAIPKTACGDNNKIEKDIDNYIASLDEYQKYTSYKVVNYNIKAKVVIQEGSFKYIITGKSGNQYVLQNVQDRFFSKKAMITIKNIDKYLNNKKLGIIMAKDNEKIIVSPARGKNNEEIFFEKTELVNLLKEIKTMYSKDIYSFSAIQNIVNNIDCSIDYSIDDFIIICNNLLQILKTNERKNADLRLIHLSGNSGTLYLGKKLKSGMKFIWQSITGYYEEILYEVK

SEQ ID NO: 788 - protein, 1411 aa, synthetic construct
  REGION 1..1411: note = MG44-403 effector
MEEQNTKKYYVGIDLGTNSCGWAVTDEEYNLRRLKGKDAFGARLFKEASVAKGRRTKRTNRRRMARRKFRIELLNSILGPAIENVDPNFLIRLKYSTFDVEDKRKASGKEINSYPLFPTKKQEKEFYKEYPTIWHLRLARIKGDEKAYSDIRYVYLALHHIIKYRGNFLWEGARNPQDDSKLNNVLDDLNLAILNLPKEEEENGNAELSHEKYQQLYTILTNHEGKKAQQKSIRSLLDISDENQKKYWDLFSKAVTGGKFSPLEQDEDDKTSFDFPHLSDDKLPECQEKMGDEFPIIDCAKKIYDFFTLKSLIGEHASEDPRSISASMVYTYDQHKQDLRAAKNALHAIDKKLGQFNAEGSYYYQFFKDPKAEHNYAAYVSVDSSIDRGKNKTNDDLIKEFQKLVKDNVDVINPEDWKILNAHINSANKDENTFMPLIAHVSTSVIPNQLHKNERMIILKNASKYYPSIFSDDTCNKIKQIFEYKIPFYYGPLAGEHSNVIRNDPNNNERITPYNIKDIVNDEKTRTNFRNKLTNNCSRLFGEPVRPKSSLDYEEYIILDRLNKILVNDHELSGKDKEDVLSYILSNGKTTKKNLVRHLALRYGRKDNDIRIAKMDADLPFTASTHAYLKKLGFDLVKDHDLLEDIILLATVYSENKYDLGNVLKAKYPQFSQKQISQLKARKTNKWGSLSRKFLTGLHPIDKDGVINDGTNILEIRRNTNQNLNEILYNSEYHYQDAIKIENDEYFNNTKVDKVQEVLDNTPAIFRRSCYQCLRILDEIKSITKADPEKIFFEVTRQDLLNKDKKKKDSRKEKLQAIYEQLKDLDKVPNVNKKLLLDNLNNSSIVDDKTLRGKHLYLYFMQLGLDLYTGKPIKIAEVLSGVTYDTDHIVPQSLIKDDSLDNLVLVNKEDNQKTKSDVYPIPKYIKTPEVVRLWKYLHEKKRMSDKKYNNLRRSTRLDEKEINGFVNRQINSVDYSNISLKDLVNIIYPNTTVVFSKAQYPSERRKEYHRPKLRELNDAHHARDAYLNIVCGNILSTEFSEKRLPMLYAQKKQEIEHKLADPSWNKDKSTVEKSFNMIKMLERHRVKDDMALAKKCQAVFNKHSALLTYALTYGDPSFYNANATSPKEKKGKYDTLVPIHTDPNSPYQNVAKYGGYDSAGTAYRYLVSYKTKKGKKEKHNLELLNVKYLYLSKYGKDEEALKKQLISDNELQNANDIKFLAKVYNGQKTIYRNSIFKIKPYGVSQISLENIYSIYMDDCFDDKELYTEYLKFWSKHIYLLQGLPIEQSELKVFTDKEQKNERIISKAKSLLILNRIKSISSQKYFLYGFFKKIQDITEEEFRSLSRSNQILALINLLLLFTSPDKAKPGDYISSFKTASFEYKPSLNLKADITLIYDSFTGLYSRKVTYKL

SEQ ID NO: 789 - protein, 1022 aa, synthetic construct
  REGION 1..1022: note = MG44-404 effector
YTVNPRIYIRGGHFILSIKGSSIYKRLQILAQILLCSSEINKLSEKEKVLLHRIGDLSIFETQVSADNSVIPYQINLAELDKILKVQSKNFAFLSEKDDAGVSVYDKIKALLTFRIPYYVGPLNNHSKFSWIVKKSQEKIVPWNFESVVDTEKSAEAFIKRMTSKCTYLSREDVLPKNSIIYSKFMVLNVLNNIRINGMRLDEAQTGLTKKVFDELYCNQINVTQKQLVAYLYNNGFLTSKEELTGFDDEPKVSMSSYVKIKNALGTDNFDINFAESFIKYSTLFPNDYLMIEKRLKREFSSECAKFNENLSKLCRIKFSGWGRLSEKLLTGLLGHNKNSEFDKNSILGFMLNGKGNLMELLSSEYTFSDLISSENSTLDKNDAFSYQNLVEGLYVSPSVKRMIWQTLLVVREITKKIMGYEPSRIFVEMARGATADQKGKRTNSRKKSILALYDKCRKDFDISEIYSSLEKQDDNKLLSDKIYLYYTQLGKSMYTGNKIELEDLLNNSKQYDIDHIIPQSLTKDDSIDNRVLVERTVNEVKDNNYPLSYQIRENQTQFWKHLLDLGLISKSKFERLIRSTSLSNSEKEGFIARQLVETRQSTKAIAGLLSKLYKKAKIIYPKAGLTADFKQKFDLIKVRELNDLHHAKDAYCNIVVGNVYFEKFTSKYQYVIANNERYSFSTSDTSYIFTNQNEKRLQQSGTWDSRNGKSISIVKKYYKRNNILMTYKQEERIGALFNQTLYGPEKGTIPKKKNMSCHDYGGYDSDQNSFFSFISYKDDKGNLKTKLIGIPLRVVYGLSDKSSAISHYLLTEKSNEYIDPKVLIDFLPYNFILKDNETGFLARVVSYATKGRQLVLKQFNSLILNEKNNKMLKAIDNFVSRLKNKSFEVKYDKDKSGFTEEDLSSIYSELKDKTKNTVLKALPKTTVKILTDVDINSYQYSENEKSEPKLLSIEQKAVAICEVIKAFHTEPSDLSLLGGKANSGKMCINSVLNLDKDDYSVVFYSITGFYEKELRLSDLLK

SEQ ID NO: 790 - protein, 698 aa, synthetic construct
  REGION 1..698: note = MG44-405 effector
NGILEICFLKYHFVNNLNVIEVMRKTNLNLQEILYLDGYRLIDAIDEYNRKNSLNDSYLCARDYIAENLVISPSFKRALIQTCSIIQEIERIFHKKIDEFYVEVTRTNKDKNKGKTTSSRYDKIKKIYSSCQELAMAYNFDMKRLKNELESNKDNLKSDILYFYFTQLGKCMYSLEDIDISDLTNNYHYDIDHIYPQSIIKDDSLSNRVLVDKKKNAAKTDKFLFEAKVLNPKAQQFYKKLLSLELISKEKYRRLTQKEISKDELEGFVNRQLVSTNQSVMGLIKLLKEYYKVDEKNIIYSKGENVSDFRHTFDLVKSRTANNFHHAHDAYLNVVVGGILNKYYTSRRFYQFSDIARIENEGESLNPSRIFTKRDKLKANGKVIWDKKEDIKRIEKDLYHRFDITETIRTYNPNKMYSKVTILPKGEGESAVPFQTTTPRVDVEKYGGITSNKFSRYVIIEAHGKKGLDTILEAIPKTACGDNNKIEKDIDNYIASLDEYQKYTSYKVVNYNIKANVVIQEGSFKYIITGKSGNQYVLQNVQDRFFSKKAMITIKNIDKYLNNKKLGIIMAKDNKKIIVSPARGKNNEEIFLGKTELVNLLKEIKTMYSKDIYSFSAIQNIVNNIDCSIDYSIDDFIIICNNLLQILKTNERKNADLRLIHLSGNSGTLYLGKKLKSGMKFIWQSITGYYEEILYEVK

SEQ ID NO: 791 - protein, 1416 aa, synthetic construct; identical to SEQ ID NO: 169
  REGION 1..1416: note = MG44-406 effector

SEQ ID NO: 792 - protein, 1378 aa, synthetic construct
  REGION 1..1378: note = MG44-407 effector
MEKKYYIGLDLGTSSVGWAATDENYNFLRLKGKTAWGARIFSEAVDCKGRRSFRSSKRRVARRKYRLLLLKNLFAEEMAKVDKTFFLRLENSTYWAEDKAKDSEGNDLGKALIFKTTEEEREFHKTYPTTWHLRKKLVDNDEQALSDLRLVYLAIHHIMKYRGNFLSDGTKDNEEPSKDTIDRINVILNLLEAKDNESGISDNITYLSKESYNDLIETLEDKNLNKTKKQDKIKKLFKNVDKTNEDIKVYIDLFKTLVTGGVFSVKKINEEYDKLKIDFNNGFDDNADEISKALGDAYELVLIAKAYNDYISLKDLLGGKPYLSYVMADIYDEHKKDLKSLKKILVSIDYKLGNEGSNRVYNLVFKPVIVPKEERKDKDGKKNKKLTTPNYASFIQGDDVEKKSVTLENLNKNIKEILEANKQYVDEIDKEEFDRLLDKASNNELFKKQATVSTSSIPHQCHLKELNKILENAGEKYPFIKENSDKIIQLFKFRVPYYYGPLNNESKEHAWIVKNEGKERTKITPWNIDEVVDKGRTREGFFKKLTNSCTYLVGETVLPKVSLVYEKYLALERLNKMQVNGNYLNHSDKMDLLNYVLGNSNTTIENIRKKLASDTGMKINDIVISNIKNNVPFTATSHAFFRKHFNLENSEEFELCEEVIKYATIYADDKKELKKFLSENFSFDEKLIKEIANLQTNKWGRLSKKFLCGGAKDEMYYTDENGVMYTILDLLEETNQNLQEIVNSGKYGFDEKIKEFNDALTKDETIDEQISKILEGTPALMVRSITQTIKVVDDVIKAAKCEPKKIIMEVTRTDEKKGQEVASRYIQLKKKISEDKEIDDKEKEGLLSDLEEANKTKKLKGKHLYLYFSQLGIDLYTGKKMKIEEVLEGKYDIDHIVPQSLIKDDSLDNQVLVNKKYNQDVKKDIYPICDEIRSKMLNLWYNYKERGIIKEEKYNRLIRTTDLTDDEINDFVKRQINVVNYSNIQIKRIFELKYPDTEIIFSKAGFPSLLRKEYEIAKMRDLNDAHHAVDAYLNIVCGDILTSLYTDVFYLINRKKEKKENPTFNMERRLLGYIKKNDLMDKIKSNCLRHDALITFKPDYDSGMFYKQTIFKKSGDKETGLIPLHTKGPMSDVKKYGGYSSLSQSYLLAVEYKVKKKTIKKLLRAPTMYVKLYGDDLNTIAKLMIDDEMATDIKVLRKIYLNQKIKYNGCYYLIYTKNEFVNKYKMAYQNYIDNDALVYLNKCLKKTDELDDKDKTEQEIIVNKDGDKLKITKEENLKIFKLIKEQYSKQIYESTPYIAKSKEMPEDAFNNLSIKKQIDTLFNMIKILSRSNEDAKFDKSLNNGSSKYFLKVNTITDDKIYIVNESPSGLFKGKEELI

SEQ ID NO: 793 - protein, 1391 aa, synthetic construct
  REGION 1..1391: note = MG44-408 effector
MKNTEVTFKKLRLGLDIGTNSVGYALLDDNNKLIKKNGHTFWGVRMFDEAKTAKDRGGFRKSRRRLLRRKERMDILRSFFTKEICSIDPSFFERLDDSFYYFEDKKNNNTYNLFTSEYTDKNFYAEYPTIYHLRQAMQDEDRKFDIRMLYLAVAHIVKYRGNFLYPGEEFSSSDYSSVKQFFLDFNDILDEISNELVDDEDYSARYFEKIENIDDDFLGKLKTTIVHTKGISNKKKALLDLFKVDKKSIYNELVIPFLSGSEKVNISSLSVIKNNKYPKVEIKIASEELESKIEDGISTAPEIKAIIEMITRIKDVTDFFFVNKILSSSNTISNSMIRIYDEHQNDLNRLKLLFKKYDSAYYNDIFRIRDKDVANYVAYVGFNDVNCKVKRFKHASREEFYKYLEKCLKNIKSNEAQAEIKYFIDKMENNELLLKQNSNQNGAFPMQLHLKELKTILNNQAKYYPFLNEVNDGYSIKDKIILTFKYKVPYYVGPLNKESKYSWVIRDDEKIYPWNFDKVVKLDETAEKFILRMQNKCTYLRGENDYCLPKNSLIFSEYTCLSYLNKIQINGRPIDPIMKLKIFSDVFLTKKQPTKKDIISFIKTNYNFDALTTTDKELPELTCNMASYIRMKEIFGDEFSENKEMIENIIKDITIFEDKTILANRLKEVYKLSNEKIKQIKSLNYKGYGRLSKNLLVGLQIIDNHTGEVKGNVIEIMRKTNLILQEILYLDGYRLIDVIDQYNKDNNSSNEDMSVEDYIDDNLVISPSFKRSLIQSYTIIKEIEHIFHKKIDEYYVEVTRTNKDKTKGKATNSRYEKIKNIYKSCDELAMAYNIDMDKLKNELEINKDKLKSDMLYFYFTQLGKCMYSLEDIDISDLNNNYHYDIDHIYPQSIIKDDSLSNRVLVDKKKNAAKMDKFLFETQIQNPNAFQFYKKLLSLELISKEKYRRLTQKEMEKEELDGFVNRQLVSTNQSVMGLIKLLKEYHRVDDNNIIYSKGENISDFRHTFDLVKSRTANNFHHAHDAYLNVVVGGIINKYYTSRRFYQFSDVSRIENEGESLNPARIFTRNIVKVNEKIIWNKTDDIARINKDLYQRFDITETIRTFNPNEMYSKVTVKPKEESENAVPFQTTTPRADVKKYGGITSNKFSRYVIIEANSKKGVETILEAIPKTACGNDARIKEDIDKYIASLDEYKKYKSYKIVNYNIKANVLIQEGNTKYIITGKSGNSYVIQNVQDRFFSKKAMRIIRNIDKYLNNVKLGISMLKDDKKIIISPARGENNNDVFLKKEELVTLLKEIKTMYSKEIYSFSAITNIVNNINLSINLSIDDLITLCNNLLQLLKTNERKNVDLKLINLSINSGTLILGKKLKPGIKFIWQSITGYYEKVLYEVK

SEQ ID NO: 794 - protein, 1614 aa, synthetic construct
  REGION 1..1614: note = MG44-409 effector
MENSNNSSKKYYLGLDMGTDSCGWCVTDDKYNIIRSHKKIYGPDGKLVKREGCHLWGSRLFGPANTAKSRRLNRTARRRLARRRRRIILLRELFQPEIDKVDPNFFKRLDQSNLWNEDKDKELQMEHNFLFNDKDLTDKKYYKDFPTIYHLRKAMVNGLTINGHYYDPKKRFDIREVYLVLAHMIKYRGNFLMEGDVKGSVVDPTYLKQCFDNIDNLIKNSIDEDNADKEDDDKIISSEYCFNVDIKRADRLINLFKNESGKQNLKDSEKIEFGKNLTGIRQSLLSLINGSAVSLKDLLPKDQILDEEFGKNKIDFSKESFENDLDSYNLNDFYSQVLLEAKKIYDFRILAHLLHDNRLLCDAMVNVYKEHKEQLAALKRLYKKFATKEQYYFMFRDPKILGLGDSNGKNKKKSKVKNQPKASYVSYIGYTKTSGKRKYTGAHVTKEETIDDLIKQIKDDIGSSIGKYAKYIISKENAYKKDKKGKETLKVGAYEVRLSNNNPNNEETIFYTANDETLIGNEKKDNPYFSEDSKEKEDSVLIMKVLESKIRFLPRQNSRNNGVFPYQLNLNEMKTIIENQSKYYPFLKDKAPSFPDGKTDEYKIVSLLKFKIPYYIGPLSQPNDYVRDDKRDNHWVQFKGENNQGIINPWNFSQIVDLEGTADKFISNLTNYCTYIFGENTLPKESLIFQAYKVLNDLNNLKVNESLISKEDKDYIIQNVYLKKKKIKGKDIRDALIKKYKNPTIRIITKGSGKEVGEEEVDLTMFNSSLSSFIDMCDERGFGNDFYKNESLFNKAEKVIELITIFEDKKLLKERLKKEGLNEEQVKYFSTKSYSGWAPLSRKLLDGITVDCDNEITGERYPVTIIDVMHDTPLNFTEIFATKNSHFSGFMEEVIKLNDEKKICRDDLIDELYASPAMKRCVRQTFKIIKELEDTLNINHFDRIFVETTRAPGDMGKIIKSRRKQIDSAYKAAKKVVGEEVNDLVGQLNNCSDDELRSKKIYLYFMQLGKSVYSGEKINLNNLENYDIDHIIPQSKLKDDSFDNIVLVEKALNNKKQDIYPIQDNILSKEGIKWINTLSQIKGENGKSYLMPEDKKNKLLRPSEKELTSSELNGFINRQLTMTNQSVKAVCDILKMTERDSDIVYSKANLVSDFRKLCGELSFRKLCGELSPYYAFVKVRDINDFHHANDAYLNIVVGNVYYEKFKDFYKYNHVEYDTNGKKDLSVLASKLFTKTQADDKTGNIYWEAHFHNEKEIDANGKESTIKVRDEGTESTFDKIEHYMELNDPLVTQMRYTQKGDQGLFGHITLMKKAKIKENNTDKYYPLKQHLRSNGEVMDVNKYGGYSNMITPYYLLVKSDNEEGKHIYSLESIPTIYLNSFKNEKEDIVNYLSKKNKLKNPIVLLDKLLIRTIVKIPYYSNNDSHFSLLKLGITGRSENDITYINLSELILSIKWKNYYKKISNLLGTNVSSSKAKDLSKYTEQMKNDPTSTLVDGTNRVEHGKNNSFYSYLIDNVISKPIFEGLPKTGCSFIKLESKYDEFCSLNTLEQAKIIATIIKLLSCKSVQKQDLSLLSDLPSQLGEIAQNKELPCGSEISYESCCGLKEYILFVVPND

SEQ ID NO: 795 - protein, 1522 aa, synthetic construct
  REGION 1..1522: note = MG44-410 effector
MFQPEIDKVDPNFFKRLDQSNLWNEDKDKELQMEHNFLFNDKDLTDKKYYKDFPTIYHLRKAMVNGLTINGHYYDPKKRFDIREVYLVLAHMIKYRGNFLMEGDVKGSVVDPTYLKQCFDNIDNLIKNSIDEDNADKEDDDKIISSEYCFNVDIKRADRLINLFKNESGKQNLKDSEKIEFGKNLTGIRQSLLSLINGSAVSLKDLLPKDQILDEEFGKNKIDFSKESFENDLDSYNLNDFYSQVLLEAKKIYDFRILAHLLHDNRLLCDAMVNVYKEHKEQLAALKRLYKKFATKEQYYFMFRDPKILGLGDSNGKNKKKSKVKNQPKASYVSYIGYTKTSGKRKYTGAHVTKEETIDDLIKQIKDDIGSSIGKYAKYIISKENAYKKDKKGKETLKVGAYEVRLSNNNPNNEETIFYTANDETLIGNEKKDNPYFSEDSKEKEDSVLIMKVLESKIRFLPRQNSRNNGVFPYQLNLNEMKTIIENQSKYYPFLKDKAPSFPDGKTDEYKIVSLLKFKIPYYIGPLSQPNDYVRDDKRDNHWVQFKGENNQGIINPWNFSQIVDLEGTADKFISNLTNYCTYIFGENTLPKESLIFQAYKVLNDLNNLKVNESLISKEDKDYIIQNVYLKKKKIKGKDIRDALIKKYKNPTIRIITKGSGKEVGEEEVDLTMFNSSLSSFIDMCDERGFGNDFYKNESLFNKAEKVIELITIFEDKKLLKERLKKEGLNEEQVKYFSTKSYSGWAPLSRKLLDGITVDCDNEITGERYPVTIIDVMHDTPLNFTEIFATKNSHFSGFMEEVIKLNDEKKICRDDLIDELYASPAMKRCVRQTFKIIKELEDTLNINHFDRIFVETTRAPGDMGKIIKSRRKQIDSAYKAAKKVVGEEVNDLVGQLNNCSDDELRSKKIYLYFMQLGKSVYSGEKINLNNLENYDIDHIIPQSKLKDDSFDNIVLVEKALNNKKQDIYPIQDNILSKEGIKWINTLSQIKGENGKSYLMPEDKKNKLLRPSEKELTSSELNGFINRQLTMTNQSVKAVCDILKMTERDSDIVYSKANLVSDFRKLCGELSFRKLCGELSPYYAFVKVRDINDFHHANDAYLNIVVGNVYYEKFKDFYKYNHVEYDTNGKKDLSVLASKLFTKTQADDKTGNIYWEAHFHNEKEIDANGKESTIKVRDEGTESTFDKIEHYMELNDPLVTQMRYTQKGDQGLFGHITLMKKAKIKENNTDKYYPLKQHLRSNGEVMDVNKYGGYSNMITPYYLLVKSDNEEGKHIYSLESIPTIYLNSFKNEKEDIVNYLSKKNKLKNPIVLLDKLLIRTIVKIPYYSNNDSHFSLLKLGITGRSENDITYINLSELILSIKWKNYYKKISNLLGTNVSSSKAKDLSKYTEQMKNDPTSTLVDGTNRVEHGKNNSFYSYLIDNVISKPIFEGLPKTGCSFIKLESKYDEFCSLNTLEQAKIIATIIKLLSCKSVQKQDLSLLSDLPSQLGEIAQNKELPCGSEISYESCCGLKEYILFVVPND

SEQ ID NO: 796 - protein, 1462 aa, synthetic construct
  REGION 1..1462: note = MG44-411 effector
MSKYYLGLDIGTDSVGFCVTDENYNIIKKHKTVIDGDKTKYYGNHLWGARLFDEASDASGRRLAREARRRYQRRKARIVLLQDLFKDERNKVDSCFFDRLNNSAIHLEDRDELLRQKHLLFNEKGYTDKEFYEKYPTIYHLRLARIEHPEQKFDIREIYLALAHRIKYRGNFLTEGERKSIGSDPDIIINTFNEIDNILISMNENDENVTPSIFHCTIEMAGALIGIFKTITKKGDLYDARITALKLPNSKSDSRCKMIALIAGSNKKLSEVFSDFNWEDLEETAAIKADFSDEDFTEKTLPGLASAIGDERTQILVKLKDLYSLRILANLLKGESSVSKAMVGIYERHQKQLEILKDRIRRYNPDKYSEFFRKSMDLSNPKKPKSLINYVNYIGFTDVKGKKIRSAHSVSEDDLYAAIKGILPLDAATSEGFIEKQPGDKDKLIQIKKEIEDKTYLPRQNSKENGVLPYQLNLNERRIILKTQSAYYPFLGELDTDFNNPDKKCYKIESILKYKIPYFVGPLSENATNHWIVKKSDERITPWNFHNVIDEEETANKFIENLKNYCTYLINEPTLPKESLIYQRYVLLNERNKWKINGAPIQAEDKAYLIKEVYFKKKKVSKKDVKEALSRHYKTDISISSSGTLASGEKGVTSDDFHASLSSWIAFLDDRAFGIALLHDKKKQELAEKIIYDITIFEDKELRKKRLAKYSLSPNQIKYISSLRFSDWAKFSNKLLTGLTTERVNTDTGEVVNYSIRDLRWETDRNFRQILTAKEGKNYKFDFRNKIEKDNDAENETLDEIIGSLYASPRRKRALHQTIKVVLELKKKLKIDSFDAYFVESTRSEQEKKRTKSRKDKILEYYKGAAKKVQDEHELATWKKELDKKDENELKGKKLFLYFRQGCKSVYTGEPIDINSLNTDYDIDHIIPQAKVKDDSFLNTVLVEKTVNNTKQDQYPIPKSILTDKGIAWIKYLSAISPDRMPKEKKNRILRSVNKPLTDQEISGFVQRQLVSTNQSVKAVCEVLKKIDKRAKIVYSRANYVSDFRKVFDLTKSREANDFHHAHDAYLNIVVGNTYDKLFSTGDPEVIKHKREYRETLNRKPEYVFKHDARRLQTDTLIWKAKRYDEDGNEMADSIGTIDKVRKFLSYQDPLVTQRIFENVGEHGFFNHIHLHTAKDGNAAFPLKANGPFAKEGFETKYGGYSDLTNPYASLVRSEAGKGKHMYSLEFIPTIARKTLGKDKKALEKYLSEKNGLKNPEIIIEKLLRRTIIQIPYKAQNGKEGSVRLGISGKSGSTVICINVSEPHISAQYRKTIKKISKLLGLNDQAGQKTDTKVYEKYGNEDIPGKITRQEILDLFNYITKDIYCRPEFEGLPSLKSTILKVKSYNLEFQQLSTLNQRTCLAAMLKIISCKSAQRTSFEMIDSKTKNVGIILTSKNLSKGTKIIQTSVTGLTERVLFTVPED

SEQ ID NO: 797 - protein, 1422 aa, synthetic construct
  REGION 1..1422: note = MG44-412 effector
MAKKYLMGLDLGTNSVGWCVTDENNHIIKKGGKSLWGVRLFDEAKDCKTRRANRAARRRTQRRAERIDLLQLLFKEEVDKVDKNFFLRLNESFYKPEDKSEPIRNDNNYLFVDKNFNDRDYKNEYPTIYHLRKALYETNEKMDIRLIYLALAHMIKYRGNFLYEGQSFKPSDIKTIESTLPRINEILTELGKDEELNLNDEYASKFSQKLFEASGVEGKKQALSELFGKGKYLSSVVYPLMAGGTRKTKVIFELDDDEEIDPSDFAFSAADADEKLEKLSEIFPNDLRLELLKLIKVVYDYVLLGKLLGDSNTLSEAMVKRYEEHNKDLKILKKYVKDHYSKVVYDDIFIKNGDQEEHANYVMYVGSVVTKGKRQRYAHCSRDNFYKFIKKKLGIDKYKNAKDIEDETLSNIYKKIEDKSYLPRQNSTDNGVFPYQLNKTELEKILETQSKFYPFLNAKDENGTTIEKIESLLTFKIPYYVGPLFAGTDGNPRGVHSWVARNSAEKIYPWNFEKIVDKDQSAERFIKRMLNRCTYLPDCYCLPLNSLLFQRYQVLSLLNKTMVNGMLISKEDKDGLIEKLFKKKPSVTKKDIKNYFDKPGEDVSVTTSNGKELEEVNASMSSYVFFSNALGEDFVKNNKDKIEDIIKDLTIFEDSKIIEERLTKVYKLSPAQIKKIKGKRFSGWGRLSKELLEMTTNYSNEYGEVFSISLIDLMERTNFILMELINDNSFDFKKKIEEANQKVDYNFANKKEKHQAIVDFVDDCYVSPGMKRPLIQAMAIIEDVEKIIGHPIDEYYVECTRSNKAKKVRKEDRRKKLMALYKKHAKELLVSSMTNKSFERVEGELNDDYYADKYRSDKFYLYLTQLGKCAYTLEDIDLAELFSNSAAYNIDHIIPQSLVKDDSLENKVLVKMTKNEDKTDIYPIPSSVKAAGANAFYKMLLKANLIGKKKYENLTRTSQLTDADLLSFVNRQLVYTNQAVKALVDVIKMFQKDKQGNAPKVIYSKAENVSDFRRDFDILKVREANNLHHAHDAYLNICVGRAVNTYFGDIRQRMIEKKWHSEKTLNVKKLFENNDNKDRKPLLDSEGNVAWDYRQSILEIKKNVFDRFDILVTTMQRVKTGQLTEATIYPATADRGNLIPVKKNSPLSDTSKYGGKSGNSCGFYCLIEQNIKNKPVISLVAIPLYFGINRSKNDLALFIKNTLKYDLIRIIIPCVRVNAKLVQGTSSARISCYNGDKRYSLNNDVELFYGKDFLSTLKKISKIKNLFPKYNDLKTKFNVNEKFICDTYSIGEREIILQPEIKGKSNAVVLKSTELLKLYSYILSKYKSDLCSLMTGFANIVKFCELPTSKENFDKLDIIGQAIVIDQLVGLFGSSISRANLSLIGGGKSVGATLLSQNSLFGISIVVESPTGFYSKVLWKGQ

SEQ ID NO: 798 - protein, 1333 aa, synthetic construct
  REGION 1..1333: note = MG44-413 effector
YIGTDIGTNSAGVACTDENYNLLRVKGKDCWAVRLFDEGKTAVDRRTFRTGRRRLQRRKQRIAWLQDLFAPYMEDETFFIRLNNSQFLPEDKDALLGGDKNTLFAGVYDDKKFHAEFPTVYHLREALMRGGVNDLRLYYLALHHIVKYRGHFLTEGSVDDVRDFGRLLGNLNGVISDVYGDEVPLFSEAAVDEAKNVLLDKTLGIKDRSTELEKIFGVKDKTSKEIIKGLCGGKISPAVLFGDEYKEEKSFSFKEITDDNFESMRGTYGDNFTVLEVIRSIYGYVIIENLLSGHDDLSSAMIAVYDKHKKDLLALKAFIRSERPEDYNKIFKSTDEKSNYVNYIGYTKKGGDKKKVKKCKDDEFYAYIKKYLQGLTDVKDIAARDKFLKDIEAGSFMQKILHSDNGLFPKQINEYELKKILENMVKSFPATAEIKDKIVTLFNYRIPYYVGPLAGKEETCWAVKKSNEKITPWNFDDVIDKAKSNEKFMLRMTNKCSYLRGEDVLPKASIIYQKFDTLNQLNKLRVNDELLSIDLKQKIFNELFLKYPKVSDKKIIDLLVREGKISQNDRSEVTLSGKDGEFKASMSSYIHLKNILGDFVDKDLSENGGVCENIILWHTLNTDKNIVVDLIKENYGKIPEIKNAIKQLKGLVFHDFGRLSRKLLCEIYTVKEDTGELWNVLDALYETNENLNELLNDEKFSFGLNIKEENGEMTSDVGYKDVEELYVSPAVRRGIWQTLTVVDEYVKAIGKAPDKIFVEVTREDGIKGDAGRTQSRKRRLQEKFRTVSDAYADVIAELGEERFTDLKLRQERLFLYFRQLGRCMYTGERIDLNNINDVTRYDVDHILPRTFIKDDSLDNKVLVLRSKNAKKSDTYPLPAGFSNQRDFWKMLLDKGLIAKVTYDRLTRTEPLREDEYQDFINRQKVITDQTVKVVAELFKRRYPTAKIVYSKAKNVNDFKQKFDLFKCRETNDLHHARDAYLNVVVGNVYDTVFTTPMSMYRKDGDVWRTYNLNKLFTRDVKGAWDNAQSIATVKKVYSKNSMVVTRYATCNNGGFYDQTIYGKDEKGITAPRKGKGPLSDSSKYGGYMTQPTAYFAVVSSKDKNGNEVKTIEAVPVLTAYMAKNDPKAVERYFSERLKDAKIIVPKIKIKQLVSYNGTQCYLAGTTGKQILVHNAVELFTDGKTDEYVNSLLKLADMKAKGIINVGQEEFVMKTNRDGERKLVIDRANNADLYGMLKRKLERENYAGLSAFATFRKNLEKGEEKFNSLTVYEQTVVLLQILKFFKCNAETADISSIGGGKIVGKIYVNINITNIDFRLIDLSPAGLTERVRKV

SEQ ID NO: 799 - protein, 524 aa, synthetic construct
  REGION 1..524: note = MG44-414 effector
MKNNEETLKKLRLGLDIGTNSVGYALLDENNKLIKKNGHTFWGVRMFDEAETAKDRGSYRKSRRRLLRRKERMEILRSFFTKEICDIDPTFFERLDDSFYYKEDKKNKNTYNLFTSEYTDKDFYLEYPTIYHLRKAMQEEDKKFDIRMVYLAIAHIIKYRGNFLYPGEEFSTSEYTSIKQFFLDFNDILDELSNELEDNEDYSAEYFDKIENINDDFLEKLKVILMEIKGISNKKKELLDLFNVNKKSIYNELVIPFISGSAKVNISSLSVIKNSKYPKTEISLGSEELEGQVEEAISVAPEIKSVLEMIIKIKEISDFYFINKILSDSKTISESMVKMYDEHNEDLKKLKGFFKKYAEDQYNEIFKIRDEKLANYVAYVGFNKLRKNKVERFKHASREEFYGYLKQKLNNIKYAEAQEEIKYFIDKIDNNEFLLKQNSNQNGAFPMQLHLKELKTILNNQEKYYPFLSEGNDGYSIKEKIILTFKYKIPYYVGPLNKESKYSWVVREDEKIYPWNFDKVVKLD

SEQ ID NO: 800 - protein, 860 aa, synthetic construct
  REGION 1..860: note = MG44-415 effector
MQNKCTYLKGDNDYCLPKNSLIFSEYSCLSYLNKLSINGKPIDPIMKSKIFNEVFLIKKQPTKKDIIEFIKTNYNADTLTTTEKELPEATYNMASYIKMKEIFGKDFNDNKEMIENIIKDITIFEDKSILGNRLKELYKLNNDRIKQIKGLNYKGYSRLSKNLLVGLQIVDNQTGEIKGNVIEVMRKTNLNLQEILYLDGYRLIDAIDEYNRKNSLNDSYLCARDYIAENLVISPSFKRALIQTCSIIQEIERIFHKKIDEFYVEVTRTNKDKNKGKTTSSRYDKIKKIYSSCQELAMAYNFDMKRLKNELESNKDNLKSDILYFYFTQLGKCMYSLEDIDISDLTNNYHYDIDHIYPQSIIKDDSLSNRVLVDKKKNAAKTDKFLFEAKVLNPKAQQFYKKLLSLELISKEKYRRLTQKEISKDELEGFVNRQLVSTNQSVMGLIKLLKEYYKVDEKNIIYSKGENVSDFRHTFDLVKSRTANNFHHAHDAYLNVVVGGILNKYYTSRRFYQFSDIARIENEGESLNPSRIFTKRDILKANGKVIWDKKEDIKRIEKDLYHRFDITETIRTYNPNKMYSKVTILPKGEGESAVPFQTTTPRVDVEKYGGITSNKFSRYVIIEAHGKKGLDTILEAIPKTACGDNNKIEKDIDNYIASLDEYQKYTSYKVVNYNIKANVVIQEGSFKYIITGKSGNQYVLQNVQDRFFSKKAMITIKNIDKYLNNKKLGIIMAKDNKKIIVSPARGKNNEEIFLEKTELVNLLKEIKTMYSKDIYSFSAIQNIVNNIDCSIDYSIDDFIIICNNLLQILKTNERKNADLRLIHLSGNSGTLYLGKKLKSGMKFIWQSITGYYEEILYEVK

SEQ ID NO: 801 - protein, 1334 aa, synthetic construct; identical to SEQ ID NO: 1
  REGION 1..1334: note = MG44-416 effector

SEQ ID NO: 802 - protein, 1131 aa, synthetic construct
  REGION 1..1131: note = MG44-417 effector
IISKENAYKKDKKGKETLKVGAYKVRLSNNNPNNEETIFYTANDETLIGNEKKDNPYFSEDSKEKKDSVLIMKVLESKIRFLPRQNSRNNGVFPYQLNLNEMRTIIENQSKYYPFLKDKAPSFPDGKTEEYKIVSLLKFKMPYYIGPLSQPNNYVRDDKRDNHWVQFKGENNQGIINPWNFSQIVDMEGTADKFINNLTNYCTYIFGENTLPKESLIFQAYKVLNDLNNLKVNGSLISKEDKDYVIENVYLKKRKIKGKDILNALKHKYKDEPSITTKGSGKSIGEDEVDLTMFNSSLSSFIDLSDSNAFGPEFYKDSSKFELAEKVIELITIVEDKDLLKERLKKLGLSDNQVNFLSRKNYSGWASLSRKLLDGITIDCVNENTGEAYPVTIIDVMRDTSLNFMEIFETKNSQFSGFKEKVAELNDEKNICRDDLIDESYASPAMKRSVRQTFKVIDELKSTLKINHFERIFVEATRAPGEAGKMVKSRKKQLEVAYDAAKDLVDQELRDDLEKQTDDQLRRKKVYLYFMQLGKSVYSGEKIDLNELDKKYDIDHIIPQAKLKDDSFNNMVLVERELNNKKQDEYPIPSTIISEQGRNWILKLSNIKDKNKRFYLMPKDKTHRLLRPESKQLTSDELNGFINRQLTLTNQSVKAVCDILKMTEKGSEIVYSKANFVSDFRKLCGELRPSYDAFVKVRDINDFHHANDAYLNIVVGNVYYEKFKNFYINNRIDYDNNGKKDLSVLASKLFTKTQTDDKTGIVYWEAHFHNEKEADSNGKERTIKVRDEGTESTFDKIEHYMELNDPLVTQMRYTLSGKQGFFNKITLKAKAKKNEDNSDKLFPLKQHLRSDSNKVMDVNKYGGYSDMSNPYFMLVKSDGKKGEHIYSLESIPMICLKSFKNEKDKIEYLVKVNGLNNPVIIVDKLLMKSTLEIPQVSNDGNICGCTKLAFTGRTNNNVVLINLSELHLPLEWKKYYKKISNFYETNASAAEKKNHNFDVFEEQMKEDPTSDLKSGAIVLTQFDNKRFYSYLAGNVFAKAMYKGIPTIGSSFAKLKDKYEVFCNLNTLEQGKVLIGLIKLLSCKSVQGTDLSLIGLSENLGLISMSKTLEEGCSIVQESATGLNRFVIYVVE

SEQ ID NO: 803 - protein, 684 aa, synthetic construct
  REGION 1..684: note = MG44-418 effector
SSDLVMTEGEGNMMEVLHLPKYEFNAKVDRYNTALFEGCDKDDAVDEIVGSIPPKMRRSVIQAIRIVKEVSKVAKKDPAVISIEVTREDNDQDKKKKKVTKSRKDQLDEFLKGLVSGEKKAKGSGDSLIGAASDARELLQEYGIDQLRGKHLYLYFLQCGIDLYTGQKIDIQRILDGSSYDTDHILPQSLIKDDSLDNLVLVNRETNQHKSNSYPLPPEIQCKMKPTWRRLRDAGMLSAKKYANLTRTTPLTESELNSFVTAQINVVNHSNVAIRDALKILYPNATLIFSKAQYPSQVRKELSIPKLRDLNDTHHAVDAYLNIVCGDMLTKTFGRMEIIKKAMETMNEEEEPKASLNMEKFISRSLASKEGELTDLANKIVANSRRHDFLMTYRFLYQDDAFYKQTIYGPNNSSGLKTVALIPMHDGMDPAKYGGYSAMATEFNCVATIRGAKKTTRYLLGVPHLLAEQYRQGMDIKDRLIALVPHKPMEAVDIDLEHPIPLMATVKAFGVEYLIIGKNADQVKLVPFSPIFMSSKSTEYFSLLTKCAEKRAELVSSHGGVIDSVLKIAGNRYSSNSIVLSNESSLNVLTELLNLAASSCYDYCPMITALRDVLTQNKLREQIVSVPFSEQFKILRSTIGLFTRKSEQLSDKKIFRKGRGVVTSDGLIIVSKSITGLYQTEKKL

SEQ ID NO: 804 - protein, 1337 aa, synthetic construct; identical to SEQ ID NO: 49
  REGION 1..1337: note = MG44-419 effector

SEQ ID NO: 805 - protein, 1465 aa, synthetic construct
  REGION 1..1465: note = MG44-420 effector
MEEKKYYLGLDIGTDSVGFCVTDRDYNIVRKHKVIQYGDHSDYHGNHLWGSRLFDEAETAASRRMARESRRRYQRRKWRIILLQNIFKPEMDKIDPFFFDRLNNSAVHLEDRKEELRDQYLLFNEDYSDKDFYEEYPTIYHLRLDMINHPEKKFDLRLVYLAFAHMIKYRGNFLTEGELSSIGNDPSTVQRLFDELNAIIASINEESELTAMSEIPCDDKIAVQIIDAFKRISKKGEIYDALVSKFNLTGMKSTDFRASVFKLISGSKIALGKLFADLEAEPEILKVSVDFAKEDFMDVDLPKLTDDIGAERISLIQKIKEIYDLRILCHLLNGKKYVSEAMVGIYDSHKKQLAELKNLIRKYNPSKYSAFFRKMTGKPSYAGYIGYTDYNSKKITSNHMTSLDDLYKEIKTILPLDSFDKPDFVFKSETDFDEFKDIRDAIDAQSLLLRQNSKDNGVLPYQLNLIEMREILKNQGQYYPFILEMDKDFNNPEKQSFKIESILKFKIPYYVGPLSDDEGINKWVQKKQTGVKITPWNFHDVIDEEKTAQAFMENLKNYCTYLMNEPTLARHSLYYSMFILLNEMNKWYVNEAPISTEDKAYLVKEVYFKVRKPSKKMIEEALKRKYGQSVKFASTNGLTNEEKGAKDEDFHANLSSWIDMLNPQGFSERLLHEPALIDKAEDIIYTIAMFEDKTLVRKSLEKMGLTAGQIKYFSGLKYDGWGKLSKKLLCGLKEEKVNNATGEVLEYSILDEMWLTNSNFMELYEKEGSAFKKQVEECNAALQEKPEDLIDQEYTSPMMKRALRQTIKIVDELKRILHIDSFDSYFVESTRSEEEKKRTKSRKKQLQEILESAKKFKSEMDDEYFKNRIERLSKELEARDEDELKGKRLFLYFMQLGRSVYTGEEISLDDLSKEYDIDHIIPQSKVKDDSFTNTVLVERGVNNKKQDQYPIPKDILTNKGIAWIRTLNSLSKLSSVPLMPDMKMKRLLRSINKPLTDEELSGFVKRQLVSTSQSVKAVCDVLKAIDPKAKIVYSKAGLVSEFRAEFGLIKSRDLNDFHHAHDAYLNIVVGNVYNKVFSTGNPDTIRYRKEHFEGFNMDLGYIFRHDQRVYQKDTLIWKAKRYDENGNELPDGKGTIDLVRKSLGYHDIVVTRMMVTNVGKQGFFNKISIHSAKAGDASYPLKTSGPFACEDYAKKYGGYSDLTNPYASLVKSEGKKGKTAYSLEYVPTIVRKSIGSDQKKLEEYLVQNNGLKKPEILIEKLLKYTIVRIPTEAENGKKGMVRVAITGKTGNSLICINQTQLILPNQYVRIVKRISNLLGTNLSAGQKKDLTFLQKYGKEDIHIDKKNDITRKECEELFDYLTKESYTRPEFEGLPKLSPTIKKLKAKKEAFVELNTLDMAKTLSIMIKMLSCKSCQGLNLKYLAIDMPSAFGDLVFSKILIPGTQIIQTSTTGLFERVLFTVPEE

SEQ ID NO: 806 - protein, 1423 aa, synthetic construct
  REGION 1..1423: note = MG44-421 effector
MAKKYLMGLDLGTNSVGWCVTDENNHIIKKGGKSLWGVRLFEEAKDCKSRRANRAARRRTQRRAERIDLLQILFKEEVDKVDKNFFLRLNESFYKPEDKSEQIRNDNNYLFVDKDFNDKDYKKKYPTIYHLRKALYEANEKMDIRLIYLALAHMIKYRGNFLYEGQSFKPSDIETVKSLLPRINETLSALGEKELELKDGYASEFNEKVLKARGITGKKEALVELFGKDSYLSNVVYPLMAGGKPATKKIFEPEDDEEIDPKVFTFSSADADEKLEKLSELFPNDLHIELLGLIRGIYDYLLIGKLLGDSTTLSEAMVKKYEEHNVDLNGDSNGDLIGLKKYVKTHLSMTDYNEIFRLKGESNYVAYVGSTNSSDGKFRCSHCDRDAFYKYIKEKLGIDKVKKAENIEDSTLRNIYEKIEDKTYLARQNSTDNGVFPYQLNKTELRKILETQSKYYPFLNKKDEYGTTIDKVESLLTFKIPYYAGPLFAGDEGNVRGSHSWVVRNSKEKIYPWNFKYVVNQDESAEKFIKRMLNRCTYLPDCYCLPLNSLLFQRYQVLSLLNKTMINGALISKEDKDGLINDVFKKNMSVSKKRILSYFVSKYGEDVSVTTSNGKELEEVNASMSSYVFFSNALGEDFVKNNEDKVEDIIKDLTIFEDSKIIEKRLKSNYGLNPEQIKKIKGKRLTGWGRLSKELLKMTTNYSNEYGEVLSISLIDLMERTNFNLMELINDDSFDFKKKIEEANQKVDYNFASKKEKHQAIVDFVDDCYVSPGMKRPLIQAMAIIEDVEKIIGHPIDEYYVECTRSNKAKKGTKDSRQKDLIKKYDEAKKLTMSAMVKESFDKAYKELKGETDLGKFRSDRFYLYLTQMGKCAYTLQDIDLAELFNEQAYDIDHIVPQSLVKDDSIENRVLVKAGANRDKKDYYPVPASVKVPGANAFYKMLLKAKLIGEKKYSNLTRTSQLTQDELLSFVNRQLVYTNQAVKALVDVLRVFQKDEKGNTPKVVYSKAENVSDFRRDFKIIKVREANNLHHAHDAYLNICVGRAVNTYFGDIRQRMIEKKWHSEKTLNVKKLFEDNENKDRKPLLDSEGNTIWDYKKSISVIRNNIFHKHDILSTTMQYVGNGSLTKKMTIYPAGNDKEMLFPVKTKGPLSDISRYGGRKNVAKSFYVLVDRKVNNKTLTTVVPVPLPYSKDVNKYLNLSFGTETQNVLISCLRINSILKIGSSKVCITGFSGESMLLKNLVEPIFSEDNLLTIKKVEKILGIISEKQKNIDLSKVNLETQKIEGLFALKNNGAELIISPASNRKASEVSLSKKEVIELYDCFVEKLGKDYYSALTGAKSLQEFISKPETRESFLNKDFVEQCYLLSQILLVIGPSISLVNMSLIGGKSNVGRTRISWNLTKDMSIVVESPTGFYSKVLWKGQ

SEQ ID NO: 807 - protein, 1396 aa, synthetic construct
  REGION 1..1396: note = MG44-422 effector
MKQCFDNIDNLIKNSIDEDNADKEDDDKIISSEYCFNVDIKRANRLINLFKNESGKQNLKDSEKIEFGKNLTGIRQSLLSLINGSAVSLKDLLPKDQILDEEFGKNKIDFSKESFENDLDSYNLNDFYSQVLLEAKKIYDFRILAHLLHDNRLLCDAMVNVYKEHKEQLAALKRLYKKFATKEQYYFMFRDPKILGLGDSNGKNKKKSKVKNQPKASYVSYIGYTKTSGKRKYTGAHVTKEETIDDLIKQIKDDIGSSIGKYAKYIISKENAYKKDKKGKETLKVGAYKVRLSNNNPNNEETIFYTANDETLIGNEKKDNPYFSEDSKEKEDSVLIMKMLESKIRFLPRQNSRNNGVFPYQLNLNEMRTIIENQSKYYPFLKDKAPSFPDGKTEEYKIVSLLKFKMPYYIGPLSQPNNYVRDDKRDNHWVQFKGENNQGIINPWNFSQIVDMEGTADKFINNLTNYCTYIFGENTLPKESLIFQAYKVLNDLNNLKVNGSLISKEDKDYVIENVYLKKRKIKGKDILNALKHKYKDEPSITTKGSGKSIGEDEVDLTMFNSSLSSFIDLSDSNAFGPEFYKDSSKFELAEKVIELITIVEDKDLLKERLKKLGLSDNQVNFLSRKNYSGWAPLSRKLLDGITIDCVNENTGEAYPVTIIDVMRDTSLNFMEIYETKNSQFSGFKEKVAELNDEKNICRDDLIDESYASPAMKRSVRQTFKVIDELKNTLKINHFERIFVEATRAPGEAGKMVKSRKKQLEVAYDAAKDLVDQELRDDLEKQTDDQLRRKKVYLYFMQLGKSVYSGEKIDLNELDKKYDIDHIIPQAKLKDDSFNNMVLVERELNNKKQDEYPIPSTIISEQGRNWILKLSNIKDKNKRFYLMPKDKTHRLLRPESKQLTSDELNGFINRQLTLTNQSVKAVCDILKMTEKGSEIVYSKANFVSDFRKLCGELRPSYDAFVKVRDINDFHHANDAYLNIVVGNVYYEKFKNFYINNRIDYDNNGKKDLSVLASKLFTKTQTDDKTGIVYWEAHFHNEKETDYNGKERTIKVRDEGTESTFDKIEHYMELNDPLVTQMQYTLSGKHGFFNKITLKAKAKENEDNSGKLFPLKQHLRSDNDKVMDVNKYGGYSDMSNPYFMLVKSDGKKGEHIYSLESIPMICLKSFKNEKDKIEYLVKVNGLNNPVIIVDKLLMKSTLEIPQVSNDGNICGCTKLAFTGRTNNKVVLINLSELHLPLEWKKYYKKISNFYETNASAAEKKNHNFDVFEEQMKEDPTSDLKSGAIVLTQFDNKRFYSYLAGNVFAKAMYKGIPTIGSSFAKLKDKYEVFCNLNTLEQGKVLIGLIKLLSCKSVQGTDLSLIGLSENLGLISMSKTLEEGCSIVQESATGLNRFVIYVVE

SEQ ID NO: 808 - protein, 1411 aa, synthetic construct
  REGION 1..1411: note = MG44-423 effector
MEEQNTKKYYVGIDLGTNSCGWAVTDEEYNLRRLKGKDAFGARLFKEASVAKGRRTKRTNRRRMARRKFRIELLNSILGPAIENVDPNFLIRLKYSTFDVEDKRKASGKEINSYPLFPTKKQEKEFYKEYPTIWHLRLARIKGDEKAYSDIRYVYLALHHIIKYRGNFLWEGARNPQDDSKLNNVLDDLNLAILNLPKEEEENGNAELSHEKYQQLYTILTNHEGKKAQQKSIRSLLDISDENQKKYWDLFSKAVTGGKFSPLEQDEDDKTSFDFPHLSDDKLPECQEKMGDEFPIIDCAKKIYDFFTLKSLIGEHASEDPRSISASMVYTYDQHKQDLRAAKNALHAIDKKLGQFNAEGSYYYQFFKDPKAEHNYAAYVSVDSSIDRGKNKTNDDLIKEFQKLVKDNVDVINPEDWKILNAHINSANKDENTFMPLIAHVSTSVIPNQLHKNERMIILKNASKYYPSIFSDDTCNKIKQIFEYKIPFYYGPLAGEHSNVIRNDPNNNERITPYNIKDIVNDEKTRTNFRNKLTNNCSRLFGEPVRPKSSLDYEEYIILDRLNKILVNDHELSGKDKEDVLSYILSNGKTTKKNLVRHLALRYGRKDNDIRIAKMDADLPFTASTHAYLKKLGFDLVKDHDLLEDIILLATVYSENKYDLGNVLKAKYPQFSQKQISQLKARKTNKWGSLSRKFLTGLHPIDKDGVINDGTNILEIRRNTNQNLNEILYNSEYHYQDAIKIENDEYFNNTKVDKVQEVLDNTPAIFRRSCYQCLRILDEIKSITKADPEKIFFEVTRQDLLNKDKKKKDSRKEKLQAIYEQLKDLDKVPNVNKKLLLDNLNNSSIVDDKTLRGKHLYLYFMQLGLDLYTGKPIKIAEVLSGVTYDTDHIVPQSLIKDDSLDNLVLVNKEDNQKTKSDVYPIPKYIKTPEVVRLWKYLHEKKRMSDKKYNNLRRSTRLDEKEINGFVNRQINSVDYSNISLKDLVNIIYPNTTVVFSKAQYPSERRKEYHRPKLRELNDAHHARDAYLNIVCGNILSTEFSEKRLPMLYAQKKQEIEHKLADPSWNKDKSTVEKSFNMIKMLERHRVKDDMALAKKCQAVFNKHSALLTYALTYGDPSFYNANATSPKEKKGKYDTLVPIHTDPNSPYQNVAKYGGYDSAGTAYRYLVSYKTKKGKKEKHNLELLNVKYLYLSKYGKDEEALKKQLISDNELQNANDIKFLAKVYNGQKTIYRNSIFKIKPRNVSQISLENIYSIYMDDCFDDKELYTEYLKFWSKHIYLLQGLPIEQSELKVFTDKEQKNERIISKAKSLLILNRIKSISSQKYFLYGFFKKIQDITEEEFRSLSRSNQILALINLLLLFTSPDKAKPGDYISSFKTASFEYKPSLNLKADITLIYDSFTGLYSRKVTYKL

SEQ ID NO: 809 - protein, 511 aa, synthetic construct
  REGION 1..511: note = MG44-424 effector
MEKFYLGIDVGTNSVGMACTDENYKLLRAKGQDLWSVRLFDEAKTAKERRTFRTARRRLERRKQRIKWLQELFAPYITDKNFFIRLNNSAFLTDDKDELLRRDKNSLFADDNFKDKNFFKEYSTIYHLRKALADGTADDLDLRFYYLALHHIIKYRGNFLYDGSLNDLGDASALFAELNAATIDFFGEEHMYFAPEKVAEAKRILISKSGLNDKKKALNELFDEKSFGADIAPRFKEIITALCGGKFSPKKLFGDEYEEQKNFSLDEISDDDFETKKVEFGDDEVAVLVAMRKIVNYAKFSKIIDGYFGCAAPLSEAMVALYNKHKADLKKLKDFIKTNGTNELYYKFFKSTEEKNNYVNYVGYTRKGGDKKKVEKCKEEEFFAYTKKFLIENFGALTETENEQGKILKEMLASIESKSFLPKILHADKGLMPRQLNQAELNKIVENMQKRMPETKEIAEKIEKLFLYKIPYYVGPLSYAGTIKEKNGVAPGHWAVRNIGKENEKNNAVEF

SEQ ID NO: 810 - protein, 849 aa, synthetic construct
  REGION 1..849: note = MG44-425 effector
MTNKCTYLRGEDVLPKRSIIYQKFDVLNQLNKLRVNDKPISVELKNKIYNNLFLTKKKVTDKGIKDLLVREGIISEKERGQTELTGKDGEFKANMSSYITFCELFGKEFVDSDLEKSDSVCENIILWHTLNEDKKLVEQLILENYGKIPQIKSNIKVLKGLSFKEFGRLSKRFLTGIAIADKKTGEYVGGVLDVLENTNLNLNELLFDEKYSLAKTLAEENGETDSAVTFDDVNELYVSPAVKRGVWQAIKMADEYVSVLGRVPNKIFVEVTRENDPKKKGVRTFSRKDELLKKYRAMKNAEDYKDVIDALSGNETYDDMKLRSEKLFLYFCQLGRCAYTGERIDLSLLNSAYDVDHILPRTYIKDDSLDNKVLVKREKNATKDDDYPLPQGFTDQRPLWEFLKNAGLMSKTKFDRLTRVEPLNDDDYNYFINRQKVITDQTAKAVAELLQRKYPNTKIVYSKAGNVSDFRDKFSLFKCRETNDLHHARDAYLNVVVGNVYDVCFPSYINTMRKQEDEWRRRNLKNLFLRNREGAWVKDDDLSITSVKNTYGKHTMAVTRMATVGKGGFYNQTVYKKGDAGISVGRKGEGILADFEKYGGYSGLSTAYFAVVGSLDKKGNLKKTIEAVPVLIEYKAKNDKNAVINYFSEYIDSPKIIVPQIKTKQLIRYNGTPFYIAGGSRYDARILAYNASQLFTDNKTDEYFKAVKKLLDMNKEVKQKPESEEFVMKTNNEGVRKLVITRQSNIEKYDLLAAQLGKDFYQVLSPFRNVKKIIDEGKKKFCELLVIDQCYVLMQILSYLQCKGATADLQLIGGSGRSGQIRFNKDITNVDFRIYDTSSTGLFVKESKA

SEQ ID NO: 811 - protein, 1366 aa, synthetic construct; identical to SEQ ID NO: 117
  REGION 1..1366: note = MG44-426 effector

SEQ ID NO: 812 - protein, 1534 aa, synthetic construct
  REGION 1..1534: note = MG44-427 effector
MENSNNSSKKYYLGLDMGTDSCGWCVTDDKYNIIRSHKKTYGPDGKLIKKEGCHLWGARLFGPAKTAKNRRLNRTARRRLARRRRRIILLRELFQPEMDKIDPNFFRRLDQSNLWNEDKDKELQMEHNFLFNDKDLTDKEYYKDFPTIYHLRKAMVNGLTINGHYYDPKKQFDIREVYLVLAHMIKYRGNFLMEGDVKGSVIDPTYLKQCFDNIDSILLNLNNDEDNENEDDQIDSSECCFNVDEKKASKLANEVFQKINKVSYLEDEEGKLFGKFNSKDIRKKILKLINGGSGVKLKDFLPKEILVAHDGDDEYGDKKIDLSSETLEDDINGYGLPESYIEIILEAKKIYDFRTLAYLLHGKSLLCDAMVNVYKEHKEQLAALKRLYKKYATKEQYYFMFRDSRILDGDDSDDKEDKEESNKEESKDKKKKASYVSYIGYTKINGKRKHTGAHITKEEKIDDLIEIIKKNIGSSIGKYAKYIIGKENAYKKDKKEKEKLKEGAYKVRLSNNNPNDEETFFYTTNDETLAGKEKKDNPYSFEDSKEKEDSVLIMKALEGKIRFLPRQNSRNNGVFPYQLNLNEMRTIIENQSKYYPFLKDKAPSFPDGKTEEYKIVSLLKFKIPYYIGPLSQPNDYVRDDKRDNHWVQFKGENNQGIINPWNFSQIVDLEGTADKFISNLTNYCTYIFGENTLPKESLIFQAYKVLNDLNNLKVNGSLISKEDKDYIIQNVYLKKKKIKGKDILNALKHKYKDEPSITTKGSGKSIGEDEVDLTMFNSSLSSFIDMSDSNAFGPEFYKDSSKFELAEKVIELITIVEDKDLLKERLKKLGLSDNQVNFLSRKNYSGWAPLSRKLLDGITIDCVNENTGEAYPVTIIDVMRDTPLNFMEIYETKESQFSGFKEKVVELNDEKNICRDDLIDESYASPAMKRSVRQTFKVIDELKSTLKINHFERIFVEATRAPGEAGKMVKSRKKQLQEAYDAAEAYDAAKDLVDQKLRENLEKQTDDKLRRKKVYLYFMQLGKSVYSGEKIDLDKLDENYDIDHIIPQAKLKDDSFNNMVLVERELNNKKQDNYPIPSTIMSEQGRKWIQTLTNIKDKNKRSYFMPKDKAYRLLRPESKQLTLDELNGFINRQLTLTNQSVKAVCDILKMTEKGSEVVYSKANLVSDFRKLCGELRLSYDAFVKVRDINDFHHANDAYLNIVVGNVYYEKFKNFYKYNHVEYDTNGKKDLSVLASKLFTKTQADDKTGIVYWEAHFHNEKEIDANGKERRIKVRDEGTESTFDKIEHYMELNDPLVTQMRYTLSGKHGLFNKITLKTKAKENKDNSGKLFPLKQHLRSDSNKVMDVNKYGGYSDMSNPYFMLVKSDGEKGKHIYSLESIPMICLKSFKNEEDKIEYLVKVNGLNNPVIIVDKLLMKSTLEIPQISNDRNVYEYVRLAFTGRTNDNLVLINLSELHLPLEWKKYYKKISNFYGTNASAAEKKNHKFDVFEEQMKEDPTSDLKSGAIVLTQFDNKRFYSYLANNVFAKAMYKGIQR

SEQ ID NO: 813 - protein, 1255 aa, synthetic construct
  REGION 1..1255: note = MG44-428 effector
MQDEDRKFDIRMLYLAVAHIVKYRGNFLYPGEEFSSSDYSSVKQFFLDFNDILDEISNELVDDEDYSARYFEKIENIDDDFLGKLKTTIVHTKGISNKKKALLDLFKVDKKSIYNELVIPFLSGSEKVNISSLSVIKNNKYPKVEIKIASEELESKIEDGISTAPEIKAIIEMITRIKDVTDFFFVNKILSSSNTISNSMIRIYDEHQNDLNRLKLLFKKYDSAHYNDIFRIRDKDVANYVAYVGFNDVNCKVKRFKHASREEFYKYLEKCLKNIKSNEAQAEIKYFIDKMENNELLLKQNSNQNGAFPMQLHLKELKTILNNQAKYYPFLNEVNDGYSIKDKIILTFKYKVPYYVGPLNKESKYSWVIRDDEKIYPWNFDKVVKLDETAEKFILRMQNKCTYLRGENDYCLPKNSLIFSEYTCLSYLNKIQINGRPIDPIMKLKIFSDVFLTKKQPTKKDIISFIKTNYNSDALTTTDKELPELTCNMASYIRMKEIFGDEFSENKEMIENIIKDITIFEDKTILANRLKEVYKLSNEKIKQIKSLNYKGYGRLSKNLLVGLQIIDNHTGEVKGNVIEIMRKTNLILQEILYLDGYRLIDVIDQYNKDNNSSNEDMSVEDYIDDNLVISPSFKRSLIQSYTIIKEIEHIFHKKIDEYYVEVTRTNKDKTKGKATNSRYEKIKNIYKSCDELAMAYNIDMDKLKNELEINKDKLKSDMLYFYFTQLGKCMYSLEDIDISDLNNNYHYDIDHIYPQSIIKDDSLSNRVLVDKKKNAAKMDKFLFETQIQNPNAFQFYKKLLSLELISKEKYRRLTQKEMEKEELDGFVNRQLVSTNQSVMGLIKLLKEYHRVDDNNIIYSKGENISDFRHTFDLVKSRTANNFHHAHDAYLNVVVGGILNKYYTSRRFYQFSDVSRIENEGESLNPARIFTRNIVKVNEKIIWNKTDDIARINKDLYQRFDITETIRTFNPNEMYSKVTVKPKEESENAVPFQTTTPRADVKKYGGITSNKFSRYVIIEANSKKGVETILEAIPKTACGNDARIKEDIDKYIASLDEYKKYKSYKIVNYNIKANVLIQEGNTKYIITGKSGNSYVTQNVQDRFFSKKAMRIIRNIDKYLNNVKLGISMLKDDKKIIISPARGENNNDVFLKKEELVTLLKEIKTMYSKEIYSFSAITNIVNNINLSINLSIDDLITLCNNLLQLLKTNERKNVDLKLINLSINSGTLILGKKLKPGIKFIWQSITGYYEKVLYEVK

SEQ ID NO: 814 - protein, 1367 aa, synthetic construct
  REGION 1..1367: note = MG44-429 effector
MADKLFIGLDVGSDSVGWAATDENFRLYRLKGKTAWGARIFSEANDAKGRRGFRVAGRRLARRKERIRLLNVLFDPLLKEKDPTFLLRLENSAIQNDDPNKPAQVVTDCPLFVNKQEEKDYYKKYPTIWHLRKALMENEEHAFSDIRFLYLAIHHIIKYRGNFLREGDIKIGQFDYSIFDRLNETLAVLFDSQNEDDGDEENRFIGLPKSQYEGFIACANDRNLPKQPKKTKLLSMFEKTEESKAFLEMFCTLCAGGEFSTKKLNAKGEETYQDTKISFNSSYDENEGTYQETLGDFFDLVDIAKAVFDYCDLSDILNGKNDLSSAFVELYESHKSQLSALKSICKKIDSQNGFVGENSIYVKLFNDPNDKSNYPAFTHNKTLVDKRCDIHTFDKYVMDAILPYESLLAGKDTINWQMLKSLAEQDRLLQTIALRSTSVIPMQLHQKELKLILKNAISRNIKGIAEIEDKILKLFQYKIPYYCVPLTTKSNYSNVVFKNNEYRPLKPWDYEEAIDWDETKKGFMEGLTNKCTYLKDKPVLPKQSILYQDFDTWNKLNNLKVNGNKPSLEELNDLFSFVSQRSKTTMRDIQRYLKSKTNSKENDAVVSGWNPEDYICCSSRASFAKNGVFDLIHPDINNPKDLNKCERIIFLKTIYTDSPKDADATVLKEFPDLTNNQKALLKTIKCKEWSPLSKEFLELRYSDKYGEIRQSIIDLLRNGEGNLMQILAKYDYQEVIDACNAASFQTKSKSQIVSDLIEEMPPKMRRPVIQAVRIVQEVSKVAKKEPDQISIEVTRENNDKEKKQELTKKAKSRSTQIQNFLKNLVKIDTSEKKQADEVLEELKKYSDQSINGKHLYLYFLQNGKDAYTGKPINIDDVLSGNKYDTDHIIPQSKMKDDSIDNLVLVEREINQHRSNEYPLPESIRKNPANVVFWRKLKKAGMMSEKKFNNLTRTNALTEEELGAFVAAQINVVNRSNVVIRDVLKILYPNAKLIFSKAQYPSQIRKELNIPKLRDLNDTHHAVDAYLNIVSGVTLTDRYGNMRFIKASQDEEKHSLNMERYISSLIQIKEGQKTELGELIDQTSRRHDFLLTYRFNYSDDAFYNLKASKKKAGLAPIHDNLPPEKYGGYDSMNREFSYIATISSGNKTTRYLIGVPHLFVDKQKAGTNIYEKLLALVPHKEKAKVVIDAEHPIALNATLKKDGIQYLCTSFNEAQLNLKPITPIFLSRESEFYLSNLMKYVEKYPNISNGNNEYEFQTNRENVGPIKFTEKQSIGVAQELIDKAKQDCFAYCPMISKLRNVNVEEIIHSTSLSNQLKIIKSLIGVFTRKSDTLSNGAYFSKSRGVILQEGLTLCSDSITGLYHSERKL

SEQ ID NO: 815 - protein, 1644 aa, synthetic construct
  REGION 1..1644: note = MG44-430 effector
MENEITQKKLRLGLDIGTNSVGYALLDENNKLIKKNGHAFWGVRMFEEASTAVDRRGYRCSRRRIARRRERVEIVRNLFAKEIYTTDQTFFERLDDSFYYSEDKRNKNTYNLFTTDYSDIDFYKNYPTIYHLRKEMMEEDKKFDIRMLYLVVSHIIKYRGNFLYPGEEFSTSDYSSIKNFFIDFNNALDNISNELIDNEDYSSIYFEKVSNLNQDFFKELKRIINEEKGISNKKTKLLALFGVNKKSLYNEVVITLLSMENEITQKKLRLGLDIGTNSVGYALLDENNKLIKKNGHAFWGVRMFEEASTAVDRRGYRCSRRRIARRRERVEIVRNLFAKEIYTTDQTFFERLDDSFYYSEDKRNKNTYNLFTTDYSDIDFYKNYPTIYHLRKEMMEEDKKFDIRMLYLVVSHIIKYRGNFLYPGEEFSTSDYSSIKNFFIDFNNALDNISNELIDNEDYSSIYFEKVSNLNQDFFKELKRIINEEKGISNKKTKLLALFGVNKKSLYNEVVITLLSGANKINVSKLSVVKANKYPDAEIKLDSEELESQIDEAISVSSELKDILDLIINIKSISDFYFVDKVLSSSSSISIAMVNMYDTHKNDLKKLKDFIKKYDKSSYNEIFRTYKKDLNNYASYIGYNDVNSKMTRFKHASREEFYAYLKKKLSNIKDLDAQEEISYFINKMDNNEFLLRQNSNQNGAFPMQLHLKELKTILNNQAKYYSFLNEISDGYTTIDKLILTFKYKIPYYVGPLNKESKKSWVVRSNEKIYPWNFDKVVKLDESAEQFILKMQNKCTYLKGDNYCLPKNSLIFSEYSCLSYLNKLSVNGSLISPDLKKKLFEEVFLTKKQPTKKDIYSFFKANNSTVTTSLLKELPEVTCNMASYIKMKEIFKASFTENINNIENIIKDITIFEDKSILENRLKNVYHLNKETIKQIKGLNYKDYGRLSKRLLTGLTIVDNETGEIKGNVLEIMRKTNLNLQEILYLDGYRLIDLIDKYNEEIQFDDKEEEVIDFIDDNLMISPSFKRSLIQSYTIITEIEKIFHKKIDEYYVEVTRTNKDKTKGKKTLSRYEKIKSIYKNCKELALEYNINLDNLDAELEKEKNSLKSDLLYFYFTQLGKCMYTLEDIDIKDLSNNYKYDIDHIYPQSIIKDDSLSNRVLVNKTKNAAKTDKFLFESGVLNPKAYKFYEKLLSLELISPEKYKRLTKKELSKNELDGFVNRQLVSTNQSVKGLIELLKEYHGVNEKNIIYSKGENVSDFRKDFDLVKSRTANNFHHAHDAYLNVVVGGVLNQYYSSRRFSTFKDISRIENEGDSLNPSKILKKNILYAYNKIIWKKDECIKKIKHDLYSRFDITETFKTSNPNEMFSKVTIMPKGEGTVPFQTTTPRKDISKYGGITSNKFSRYVIVEVFDKKGKQTILEPIPKTACSDEKTLKEDIYNYIVSLDEYKNYNVINIVNYNIKINSIIEDGKLRYAITGKTGNQYLLMNVQDRFFSKKSMSIIKKIDKYLENKKYEIKMEIKEDEVIISPARGMKNGIISLTKAELINLLIEIKNVFSKEIYAFSAIKNIVEMIDLEKNYSIEELISLNSNLLQLLKTNERKNADLSLINLSKNSGTLLISKKLKPGMKFISESITGYYKKVLYEVN

SEQ ID NO: 816 - protein, 1386 aa, synthetic construct
  REGION 1..1386: note = MG44-431 effector
MAKQKILCGLDIGTNSVGWCVTDENNKVIKKQGKSLWGVRMFEEAKDAKERRGFRSSRRRLKRRKERLSLLQSLFSIPMNEVDASFFYRLSNSFYHNEDREHPFQYTLFNSVNYTDKQYYDEFPTIYHLRKHLLESKEKEDLRFIYLALHHMIKYRGNFLSEGTSFKPLDKESADSDFRALQALIEEESRFDGENISYDDNIFEELKIANKNIKRLGDLQDRFNELLNPLKNGFIKSNIIPLMLGKKIKIKNLKLEDSEEKLELKEVCPADENYEDNIQLILASYPEEENLVEILLLLQKIYQFFLLGKLLGDHQYLCNAMVKRYEKHHSDLKQLKAYIRKYHNEDYGRLFRKPRKKGEKEEANYSSYVGSYIVNGEEPCRFGRGGKQEEFFKLIKSILAQDNNQEAKDIIQSIDNKDYLPLLNSTSNGVFPYQLNLLEMKVILENQSKYYEFLNERDEDGTIADKIISLLTFKIPYYVGPLSSKASHSWIVRKEGKIYPWNFYRMVKKDDTAAEFIKRMLNRCSYLPSEYCLPKDSLIFTYYNVLSFLNKLQVNGDYLDYEEKMELISLFKTKRKVNVKEIENFFKHKNPGIEVSITTSNGKGLSNIACNMSSYYDFANIYSPEYVDSHTDEIEAIIQDIVIFEDKQILEERLKNTHGIEDISIIKKIKGLNYTKYGRLSKELLVGLKAANQETGELYGCILHIMEHSNMNLQEIIHAEEFNFQALIDDYNQTHSSSEKKDTIEGYVDTLYVNPGMRRGLIQAYKIIEELEKILKRPIDEFYVECSRTNKEKKQPSSSRKQKLITLYNEAIKTTKDAQDLKSLLNHLESMDENQFQSDKFYLYFLQMGRCMYSGDPIDIDSLFDTSKYDIDHIIPQSLIKDDSFNNRVLVKQELNREKTATYPIESSLLFHGNRSKAFAFYQHLKDMGLMSEDKFEKLRRTQPLKDEEYAAFANRQLVYTNQAVAGLISAIQYFKRDSGHMPRIIYSKAENVSDFRKAFELVKSRTANNFHHAHDAYLNIVVGRTLDSYFSPFKQNKDTIHQMHLEKKTTNPLKVFTADYKVFDLSGNLVWDKENSLKEIRHQLYERYDILTTTRTYQGTTLFEKVTIYKKGEGNIGVKASGPLANASEYGGLTGYAFGFYTLIKIDRIYILEAIPTLFKNDIKEYLNTLYKEDYEIIVPILNINSVIMEGKKKYCITGKTGNQYLIKNLLERRFTYRELTIIHKLDKIQERLTKNKTSLKGTETEEDLKKLGLYLKENYLIVSIAKNKDAKQIELSYDECSELYDSINNILNKEIYAYSASSTISTLLNEQRDYFEKSSIALKIKVLLNLLNFLKCNERKSVDLTLLAGKSTMGILYLGKKLKPSKIIAESITGFYAKVIWEIK

SEQ ID NO: 817 - protein, 905 aa, synthetic construct; identical to SEQ ID NO: 83
  REGION 1..905: note = MG44-432 effector

SEQ ID NO: 818 - protein, 1393 aa, synthetic construct
  REGION 1..1393: note = MG44-433 effector
MKNNEETLKKLRLGLDIGTNSVGYALLDENNKLIKKNGHTFWGVRMFDEAETAKDRGSYRKSRRRLLRRKERMEILRSFFTKEICDIDPTFFERLDDSFYYKEDKKNKNTYNLFTSEYTDKDFYLEYPTIYHLRKAMQEEDKKFDIRMVYLAIAHIIKYRGNFLYPGEEFSTSEYTSIKQFFLDFNDILDELSNELEDNEDYSAEYFDKIENINDDFLEKLKVILMEIKGISNKKKELLDLFNVNKKSIYNELVIPFISGSAKVNISSLSVIKNSKYPKTEISLGSEELEGQVEEAISVAPEIKSVLEMIIKIKEISDFYFINKILSDSKTISESMVKMYDEHNEDLKKLKGFFKKYAEDQYNEIFKIRDEKLANYVAYVGFNKLRKNKVERFKHASREEFYGYLKQKLNNIKYAEAQEEIKYFIDKIDNNEFLLKQNSNQNGAFPMQLHLKELKTILNNQEKYYPFLSEGNDGYSIKEKIILTFKYKIPYYVGPLNKESKYSWVVREDEKIYPWNFDKVVKLDETAEKFILRMQNKCTYLKGDNDYCLPKNSLIFSEYSCLSYLNKLSINGKPIDPIMKSKIFNEVFLIKKQPTKKDIIEFIKTNYNADALTTTEKELPEATCNMASYIKMKEIFGKDFNDNKEMIENIIKDITIFEDKSILGNRLKELYKLNNDRIKQIKGLNYKGYSRLSKNLLVGLQIVDNQTGEIKGNVIEVMRKTNLNLQEILYLDGYRLIDAIDEYNRKNSLNDSYLCARDYIAENLVISPSFKRALIQTCSIIQEIERIFHKKIDEFYVEVTRTNKDKNKGKTTSSRYDKIKKIYSSCQELAMAYNFDMKRLKNELESNKDNLKSDILYFYFTQLGKCMYSLEDIDISDLTNNYHYDIDHIYPQSIIKDDSLSNRVLVDKKKNAAKTDKFLFEAKVLNPKAQQFYKKLLSLELISKEKYRRLTQKEISKDELEGFVNRQLVSTNQSVMGLIKLLKEYYKVDEKNIIYSKGENVSDFRHTFDLVKSRTANNFHHAHDAYLNVVVGGILNKYYTSRRFYQFSDIARIENEGESLNPSRIFTKRDILKANGKVIWDKKEDIKRIEKDLYHRFDITETIRTYNPNKMYSKVTILPKGEGESAVPFQTTTPRVDVEKYGGITSNKFSRYVIIEAHGKKGLDTILEAIPKTACGDNNKIEKDIDNYIASLDEYQKYTSYKVVNYNIKANVVIQEGSFKYIITGKSGNQYVLQNVQDRFFSKKAMITIKNIDKYLNNKKLGIIMAKDNKKIIVSPARGKNNEEIFLEKTELVNLLKEIKTMYSKDIYSFSAIQNIVNNIDCSIDYSIDDFIIICNNLLQILKTNERKNADLRLIHLSGNSGTLYLGKKLKSGMKFIWQSITGYYEEILYEVK

SEQ ID NO: 819 - protein, 1420 aa, synthetic construct; identical to SEQ ID NO: 3
  REGION 1..1420: note = MG44-434 effector

SEQ ID NO: 820 - protein, 1386 aa, synthetic construct
  REGION 1..1386: note = MG44-435 effector
MAKQKILCGLDIGTNSVGWCVTDENNKVIKKQGKSLWGVRMFEEAKDAKERRGFRSSRRRLKRRKERLSLLQSLFSIPMNEVDASFFYRLSNSFYHNEDREHPFQYTLFNSVNYTDKQYYDEFPTIYHLRKHLLESKEKEDLRFIYLALHHMIKYRGNFLSEGTSFKPLDKESADSDFRALQALIEEESRFEGENISYDDNIFEELKIANKNIKRLGDLQDRFNELLNPLKNSFIKSNIIPLMLGKKIKIKNLKLEDSEEKLELKEICPADENYEDNVQLILASYPEEENLVEILLLLQKIYQFFLLGKLLGDHQYLCNAMVERYEKHHNDLKQLKAYIRKYHNEDYGRLFRKPRKKGEKEEANYSSYVGSYIVNGEEPCRFGRGGKQEEFFKLIKSILAQDNNQEAKDIIQSIDNKDYLPLLNSTSNGVFPYQLNLLEMKVILENQSKHYEFLNERDEDGTIAEKIISLLTFKIPYYVGPLSSKANHSWIVRKEGKIYPWNFYRMVKKDDTAAEFIKRMLNRCSYLPSEYCLPKDSLIFTYYNVLSFLNKLQVNGKYLGYEEKMELISLFKVKRKVNVKEIENFFKHKNPGTEVSITTSNGKGLSNIACNMSSYYDFANIYSPEYVDSHTDEIEAIIQDIVIFEDKQILEERLKNTHGIEDISIIKKIKGLNYTKYGRISKELLVGLKAANQETGELYGSILHIMEQSNMNLQEIINAEEFNFQALIDDYNQVHSSGDKKDTIEGYVDTLYVNPGMRRGLIQAYKIIEELEKILKRPIDEFYVECARTNKEKKQPSSSRKQKLITLYNEAIKATKDTQDLKSLLNHLESMDENQFQSDKFYLYFLQMGRCMYSGDPIDIDSLFDTSKYDIDHIIPQSLIKDDSFNNRVLVKQELNREKTATYPIESSLLFHGNRSKAFAFYQHLKDMGLMSEDKFEKLRRTQPLKDEEYAAFANRQLVYTNQAVAGLISAIQYFKRDSGHMPRIIYSKAENVSDFRKVFELVKSRTANNFHHAHDAYLNIIVGRTLDSYFSPFKQNKDTIHQMHLENKTTNPLKVFTANYKVFDLSGNLVWDKENSLKEIRHQLYERYDILTTTRTYQGTTLFEKVTIYKKGEGNIGVKAGGPLANASEYGGLTGYAFGFYTLIKIDRIYILEAIPTLFKNDIKEYLNTLYKEDYEIIVPILNINSVIMEGKKKYCITGKTGNQYLIKNLLERRFTYRELTIIHKLDKIQERLTKNKTSLKGTETEEDLKKLGLYLKENYLIVSIAKNKDAKQIELSYDECSELYDSINNILNKEIYAYSASSTISTLLNEQRDYFEKSSIALKIKVLLNLLNFLKCNERKSVDLTLLAGKSTMGILYLGKKLKPSKIIAESITGFYAKVIWEIK

SEQ ID NO: 821 - protein, 1393 aa, synthetic construct
  REGION 1..1393: note = MG44-436 effector
MKNNEETLKKLRLGLDIGTNSVGYALLDENNKLIKKNGHTFWGVRMFDEAETAKNRGSYRKSRRRLLRRKERMEILRSFFTKEICDIDPTFFERLDDSFYYKEDKKNKNTYNLFTSEYTDKDFYLEYPTIYHLRKAMQEEDKKFDIRMVYLAIAHIIKYRGNFLYPGEEFSTSEYTSIKQFFLDFNDILDELSNELEDNEDYSAEYFDKIENINDDFLEKLKVILMEIKGISNKKKELLDLFNVNKKSIYNELVIPFISGSAKVNISSLSVIKNSKYPKTEISLGSEELEGQVEEAISVAPEIKSVLEMIIKIKEISDFYFINKILSDSKTISESMVKMYDEHNEDLKKLKGFFKKYAEDQYNEIFKIRDEKLANYVAYVGFNKLRKNKVERFKHASREEFYGYLKQKLNNIKYAEAQEEIKYFIDKIDNNEFLLKQNSNQNGAFPMQLHLKELKTILNNQEKYYPFLSEGNDGYSIKEKIILTFKYKIPYYVGPLNKESKYSWVVREDEKIYPWNFDKVVKLDETAEKFILRMQNKCTYLKGDNDYCLPKNSLIFSEYSCLSYLNKLSINGKPIDPIMKSKIFNEVFLIKKQPTKKDIIEFIKTNYNADALTTTEKELPEATCNMASYIKMKEIFGKDFNDNKEMIENIIKDITIFEDKSILGNRLKELYKLNNDRIKQIKGLNYKGYSRLSKNLLVGLQIVDNQTGEIKGNVIEVMRKTNLNLQEILYLDGYRLIDAIDEYNRKNSLNDSYLCARDYIAENLVISPSFKRALIQTCSIIQEIERIFHKKIDEFYVEVTRTNKDKNKGKTTSSRYDKIKKIYSSCQELAMAYNFDMKRLKNELESNKDNLKSDILYFYFTQLGKCMYSLEDIDISDLTNNYHYDIDHIYPQSIIKDDSLSNRVLVDKKKNAAKTDKFLFEAKVLNPKAQQFYKKLLSLELISKEKYRRLTQKEISKDELEGFVNRQLVSTNQSVMGLIKLLKEYYKVDEKNIIYSKGENVSDFRHTFDLVKSRTANNFHHAHDAYLNVVVGGILNKYYTSRRFYQFSDIARIENEGESLNPSRIFTKRDILKANGKVIWDKKEDIKRIEKDLYHRFDITETIRTYNPNKMYSKVTILPKGEGESAVPFQTTTPRVDVEKYGGITSNKFSRYVIIEAHGKKGLDTILEAIPKTACGDNNKIEKDIDNYIASLDEYQKYTSYKVVNYNIKANVVIQEGSFKYIITGKSGNQYVLQNVQDRFFSKKAMITIKNIDKYLNNKKLGIIMAKDNEKIIVSPARGKNNEEIFFEKTELVNLLKEIKTMYSKDIYSFSAIQNIVNNIDCSIDYSIDDFIIICNNLLQILKTNERKNADLRLIHLSGNSGTLYLGKKLKSGMKFIWQSITGYYEEILYEVK

SEQ ID NO: 822 - protein, 1386 aa, synthetic construct
  REGION 1..1386: note = MG44-437 effector
MAKQKILCGLDIGTNSVGWCVTNENNKVIKKQGKSLWGVRMFEEAKDAKERRGFRSSRRRLKRRKERLSLLQSLFSIPMNEVDASFFYRLSNSFYHNEDREHPFQYTLFNSVNYTDKQYYDEFPTIYHLRKHLLESKEKEDLRFIYLALHHMIKYRGNFLSEGTSFKPLDKESADSDFRALQALIEEESRFEGENISYDDNIFEELKIANKNIKRLGDLQDRFNELLNPLKNGFIKSNIIPLMLGKKIKIKNLKLEDSEEKLELKEVCPADENYEDNIQLILASYPEEENLVEILLLLQKIYQFFLLGKLLGDHQYLCNAMVERYEKHHSDLKQLKAYIRKYHNEDYGRLFRKPRKKGEKEEANYSSYVGSYIVNGEEPCRFGRGGKQEEFFKLIKSILAQDNNQEAKDIIQSIDNKDYLPLLNSTSNGVFPYQLNLLEMKVILENQSKYYEFLNERDEDGTIADKIISLLTFKIPYYVGPLSNKASHSWIVRKEGKIYPWNFYRMVKKDDTAAEFIKRMLNRCSYLPSEYCLPKDSLIFTYYNVLSFLNKLQVNGDYLDYEEKMELISLFKTKRKVNVKEIENFFKHKNPGTEVSITTSNGKGLSNIACNMSSYYDFANIYSPEYVDSHTDEIEAIIQDIVIFEDKQILEERLKNTHGIEDISIIKKIKGLNYTKYGRLSKELLVGLKAANQETGELYGSILHIMEHSNMNLQEIIHAEEFNFQALIDDYNQAHSSSDKKDTIEGYVDTLYVNPGMRRGLIQAYKIIEELEKILKRPIDEFYVECSRQNKTKKEPTSSRKQQLIKLYKDAISATKDALEFKKLLNRLEEVDENQFQSDKFYLYFLQMGRCMYSGDPIELDSLFDTSKYDIDHIIPQSLIKDDSFTNRVLVKQELNREKTAVYPIQSSLLFHGDKSKAFAFYRYLKDMKLMSEDKFARLTRTQPLKDEEYAAFANRQLVFTNQAVAGLIGAIQYFKRDSDHMPRIIYSKAENVSDFRKVFELVKSRTANNFHHAHDAYLNIIVGRTLDSYFSPFKQNKDTIHQMHLEKKTTNPLKVFTSNYKVFDLSGNLVWDKENSLKEIRHQLYERYDILTTTRTYQGTTLFEKVTIYKKGEGNIGVKASGPLANASEYGGLEGFAFGFYTLIKTNKNYILEAIPTLFKNDIKEYLSTLYKEDYEIIVPILNINSVIMEGKKKYCITGKTGNQYVIKNLLERRFTYRELTIIHKLDKIQERLTKNKISLKGNETKEDLKKIGLYLKDNYLIVSIAKNKDVKQIELSNDECTELYDSLNNILNKEIYAYSASSTISTLLNEQRDYFEKSSIALKIKVLLNLLAYLKCNERKSVDLTLIYGKSKMGTLYLGKKIKPCKIIAESITGFYTKVIWEIK

SEQ ID NO: 823 - protein, 1461 aa, synthetic construct
  REGION 1..1461: note = MG44-438 effector
MSKYYLGLDIGTDSVGFCVTDENYNIIKKHKTVIDGDKTKYYGNHLWGARLFDEASDASGRRLAREARRRYQRRKARIVLLQDLFKDERNKVDSCFFDRLNNSAIHLEDRDELLRQKHLLFNEKGYTDKEFYEKYPTIYHLRLARIEHPEQKFDIREIYLALAHRIKYRGNFLTEGERKSIGSDPDIIINTFNEIDNILISMNENDENVTPSIFHCTIEMAEALIGIFKTITKKGDLYDARITALKLPNSKSDSRCKMIALIAGSNKKLSEVFSDFNWEDLEETAAIKADFSDEDFTEKTLPGLASAIGDERTQILVKLKDLYSLRILANLLKGESSVSKAMVGIYERHQKQLEILKNRIRRYNPNKYSEFFRKSMDLSNPKKPKSLINYVNYIGFTDVKGKKIRSAHSVSEDDLYAAIKGILPLDAATSEGFIEKQPGDKDKLIQIKKEIEDKTYLPRQNSKENGVLPYQLNLNERRIILKNQSAYYPFLGELDTDFNNPDKKCYKIESILKYKIPYFVGPLSENATNHWIVKKSDERITPWNFHNVIDEEETANKFIENLKNYCTYLINEPTLPKESLIYQRYVLLNERNKWKINGAPIQVEDKAYLIKEVYFKKKKVSKRDVEEALFRHYKTNISISSGTLASGEKGVTSDDFHASLSSWIAFLDDRAFGIALLHDKKKQELAEKIIYDITIFEDKELRKKRLTKYSLSPNQIKYISSLRFSDWAKFSNKLLTGLTTERVNTDTGEVFNYSIRDLRWETDRNFRQILTTKEGKNYKFDFRNKIEKDNDAENETLDEIIGSLYASPRRKRALHQTIKVVLELKKKLKIDSFDAYFVESTRSEQEKKRTKSRKEKILEYYKDAVKKVQDEHELASWKKELDKKDENELKGKKLFLYFRQGCKSVYTGEPIDINSLNTDYDIDHIIPQAKVKDDSFLNTVLVEKTVNNTKQDQYPIPKSILTDKGIAWIKYLSAISPDRMPKEKKNRILRSVNKPLTDQEISGFVQRQLVSTNQSVKAVCEVLKKIDKKAKIVYSRANYVSDFRKVFDLTKSREANDFHHAHDAYLNIIVGNTYDKLFSTGDPDVIKHKREYREALNRKPEYVFKHDARRLQTDTLIWKAKRYDEDGNEMADSIGTIDKVRKFLSYQDPLVTQRTFVNVGKQGFFNKIHLHTAKDGDAAFPLKAKGPFAKEGFETKYGGYSDLTNPYASLVRSEAGKGKHIYSLEFIPTIARKTLGKDKKALEKYLSEKSGLKNPEILIEKLLRRTIIQIPYKAQNGKEGSIRLGISGKSGSNVICINFSEPHISAQYRKTIKKISKLLGLNDQAGQKTDTKVYEKYGNEDIPGKITRQEILDLFDYITKDIYCRPEFEGLPSLKSTILKVKSYNLEFQQLSTLNQMTCLAAMLKIISCKSVQGTSFEMIDSKTKNAGIIKASKNLSKGAKIIQTSVTGLTERVLFTVPED

SEQ ID NO: 824 - protein, 748 aa, synthetic construct
  REGION 1..748: note = MG44-439 effector
MSSYIHLKNILGDFVDKDLSENGGVCENIILWHTLNTDKNIVVDLIKENYGKIPEIKNAIKQLKGLVFHDFGRLSRKLLCEIYTVKEDTGELWNVLDALYETNENLNELLNDEKFSFGLNIKEENGEMTSDVGYKDVEELYVSPAVRRGIWQTLTVVDEYVKAIGKAPDKIFVEVTREDGIKGDAGRTQSRKRRLQEKFRTVSDAYADVIAELGEERFTDLKLRQERLFLYFRQLGRCMYTGERIDLNNINDVTRYDVDHILPRTFIKDDSLDNKVLVLRSKNAKKSDTYPLPAGFSNQRDFWKMLLDKGLIAKVTYDRLTRTEPLREDEYQDFINRQKVITDQTVKVVAELFKRRYPTAKIVYSKAKNVNDFKQKFDLFKCRETNDLHHARDAYLNVVVGNVYDTVFTTPMSMYRKDGDVWRTYNLNKLFTRDVKGAWDNAQSIATVKKVYSKNSMVVTRYATCNNGGFYDQTIYGKDEKGITAPRKGKGPLSDSSKYGGYMTQPTAYFAVVSSKDKNGNEVKTIEAVPVLTAYMAKNDPKAVERYFSERLKDAKIIVPKIKIKQLVSYNGTQCYLAGTTGKQILVHNAVELFTDGKTDEYVNSLLKLADMKAKGIINVGQEEFVMKTNRDGERKLVIDRANNADLYGMLKRKLERENYAGLSAFATFRKNLEKGEEKFNSLTVYEQTVVLLQILKFFKCNAETADISSIGGGKIVGKIYVNINITNIDFRLIDLSPAGLTERVRKV

SEQ ID NO: 825 - protein, 1356 aa, synthetic construct; identical to SEQ ID NO: 32
  REGION 1..1356: note = MG44-440 effector

SEQ ID NO: 826 - protein, 1371 aa, synthetic construct
  REGION 1..1371: note = MG44-441 effector
MKKDFYIGLDLGTDSLGWAATDTDYNFLRLKGKTAWGSRIFEGAKSKKERRVYRSSRRRKERQKYRIQLLNSLFAEEINKVDKTFFLRLENANLRMEDKDKSIDSKYLFKSIEEEKLFYDKYPTIWHLRRDLINGDPFALSDLRYVYLAIHHIIKYRGNFLKEGETNYNNVTEEVIERINNCLSLLAENIEDESSSLSKAKLTELKNILLDKNLNKTAKQKKIIELFDVVSCKEYITMFATIVTGGNYKLSKIDKALEESINFTENFEEMEDQIAHDLGDAFELVKCAKELYDFASLKELMGNEKYISFVMANIYEEHKEDLATLKKFIKAFDKSKSLSGKDSLYDLIFINEGNNNYDALKKVITEIDESNGLSGKDSLHDLLFKKEEKNNYVALVGVNSKNKKIKLEDFNKVIEKILENNKEIIEPSNYKKLDEKVKARQLLRTIAHNSTSLIPHQVHLIELKEILKNAEKKYHFIKNISEKIITLFKFRVPYYYGPLDSRSEFAWVERKSNEKITPWNISEIVDDNATKEKFIKRLTNNCTYLLGEKVLPKVSLIFEEFMIRDRLNTMILNGALLTNETKSLIYEYIISRNKTTVSQIKSFLKNKTATKENDITISGIKEDVPFEATSHATLEKLFDLKHDFDKVEHLIFLATIYADDKKSFKTLLTNSKDLSKEQIKAMLNLPTKKWAPLSKKLLCGISFVDDNGIAMSILDVMRETNQNFQMVYNNKDYGFKDLVDMHNNEITGNLSINQKIAMILEDTPTITKRSINQALLVLDDIVKASGNNPKKIFIETTRENDANSKGKEKDKRYVELKRLISKDIEIISKENKKELLNELELNQANVKGRHLYLYFKQMGLDMYTGEKINIEDVFDSTKYDLDHIVPQSLIKDDSLDNLVLVNRLANQRIKGSQYPLPRELKTDKVIKTWQYLHKIGAISDKKYNSLMRTSEITLEEIEVFVNRQINVVDYANITLRNVLKIKYPDTQLIFSKAQYPALLRQELNIAKNRDLNDAHHAVDAYLNVVAGNELTMKFSNVRRIYAERSNKEDKDSRSFNMDGCLKNFVKKLDKNCVTYAEKIKKNALRHDALVTFKVDYQNGALYNATIYRKANDSNLIPIHTNGPLADVSKYGGYSDLSQAYIVAIEYNLGSKHYKDLLRVPLLYIKLYGDNNETLWKKVIGNDVASDIKIIKRIHLNQKIKYKNCIYLLYTADGKRNKYKLAYQSYLNNDLLCYFNKCDSLLDSLSSFDGDIFETKVNKNGDSFVVSKSKNIEIFNSIREIYDNYVFDGCNFIVKARNMDDNLFSNLTLYEQIVTIENMILILNRKSERAKFDYRLGNAKANVFYVTHNIIDQDITLIFESPSGLYKHEEKI

SEQ ID NO: 827 - protein, 1398 aa, synthetic construct
  REGION 1..1398: note = MG44-442 effector
MENKYYVGIDLGTSSVGWAATDENYNFLRLKGKTAWGARLFDGANTCQKRRERRSKRRRMARRKYRLLLLNQLFAEEMAKVDKTFFLRLANSTYWAEDKAKDDKGNDLGKNIIFKTWKEESEFYNNYKTIWHLRNELVKNNDNAFSDLRLVYLAIHHIIKYRGNFLTEGDNFNEKPTVELIRELNSILSKLDEENSNDFLLDDEESIIEDENNKYISEDKLDKLLEILKSDEYKSKKDKQNDIDKLFVKNRSQLIKKYIDMYKVLVTGGSFKISRIDKELGDLEIDFNNGFDENLDEIKSKLGNAIDLVFNAKKIHDYNSLSKLFGDKNANKNLSQIMVDVYDNHKKDLRNLKKVIRSVDVKLDKKGKESLYYSIFRPIKLTKEDNKRDENNKKTKKSQTPNYASFVQGDDINFKYVTLEKLNDNLKEVLEKNKQYIDDEETYIDLHDKAEKGILLQKPANVSTSLIPHQSHLQELKIILKNASDRYPFIKEIEDKIIKLFMFKVPYYYGPLSTSKSHPYAWVETKEEGTKITPWNMYDVVDEEKTRNKFMKRLINSCSYLDGEPVLPKVSLCYEEYLVLDSLNKMMLNGQFLSPSVKESVLKYILSRSKTTIGNIKTFLKKENELYQNELKDDDISISNIKSDIIFNASSHALLSKYFDLEKDKEMVESLILLATIYAGDSKSLIEAINSNKNYKELTKEQVNAISKLPTNKWGRLSKTFLCGGKDGEMYWVDESIGRCCSILEIMQETNKNLQEVLFDKTYRFQDKINKFNADLRGNKTVKDQIDDIYDEMPSVFVRSVTQTIAVLDDVVRAAKCAPNKIYIEVTRADQEKKETKSRYDALKEVIKKELKDEADRRDSLLEKLEYANNSRKLRSINVYLYFLQLGIDFYTGEPIKDLNDVINGIYDKDHIVPQSLRPDDSIDNLVLVNKDYNEKVKRDIYPIVAPIRNEKTLKLWKSYHKRKLISDKKYNSLIRTTELTYEEINDFVNSQINVVNFSNVQLKRILELKYPDTKVCFTKAIYASSLRQKLSIAKMRDLNDSHHAVDAYLNIVGGDILSNLYTDVFYLYDEKKNKKKNVSFDMEKRLHNYIEDNNLKDKIRTNCFRHDALITYKPKFSTSKKAGDLYKETIFEKADKDSVNLIPCHTKGPMKDTKKYGGYSQINQSYILAVEYTSGKKTVKKLLRVPTMYLNLYGNNEEELLKLIVNDEKAKDIKILRKIYINQKIKYNGCYYRIFTKGKNNIYKMAYQNYIDNNIVLYLNKSLKLSDDLIDKTIDSQTFIINNKGEKFIISKEKNKIIFDTIKERMFNKRYDECSYFEKAREMKFEIFNNLSLKEQISTLINMLKLLSCSTESVNINAEFKVEKRLLFVNSPDITKEEIYIVNESPSGLFKGKEELI

SEQ ID NO: 828 - protein, 667 aa, synthetic construct
  REGION 1..667: note = MG44-443 effector
KDEMYYTDENGVMYTILGLLEETNQNLQEIVNSGKYGFDEKIKEFNDALTKDETIDEQISKILEGTPALMVRSITQTMKVVDDVIKATKCEPKKIIMEVTRTDEKKGQEVASRYIQLKKKISEDKGIDGKEREELLSDLEEANKTKKLKGKHLYLYFSQLGIDLYTGKKMKIEEVLEGKYDIDHIVPQSLIKDDSLDNQVLVNKKYNQDVKKDIYPICDEIRSKMLNLWYNYKERGIIKEEKYNRLIRTTDLTDDEINDFVKRQINVVNYSNIQIKRIFELKYPDTEIIFSKAGFPSLLRKEYEIAKMRDLNDAHHAVDAYLNIVCGDILTSLYTDVFYLIKRKKEKKENPTFNMERRLLGYIKKNDLMNKIKSNCLRHDALITFKPDYDSGMFYKQTIFKKSGDKETGLIPLHTKGPMSDVKKYGGYSSLSQSYILAVEYKVKKKTVKKLLRIPTMYIKLYGEDLNTIAKLMIDDEKAINIKILRKICLNQKVRFNNCYYLIYTSDDTRCKLKMAYQNYIDNDALVYLNKCLKKIDELDDKDKTEQEIIVNKDGDKLKITKEENLKIFKLIKEQYSKSIYNSITYIVKSRDILEDSFNNLSIKKQIDTLFNMIKILSRSNEDAKFDESLKNGGIKYYRISMNIDNNQIYIVNESPSGLFKGKEELI

SEQ ID NO: 829 - protein, 514 aa, synthetic construct
  REGION 1..514: note = MG44-444 effector
MPKDKANRLLRPESKQLTSDELNGFINRQLTLTNQSVKAVCDILKMTEKGSEIVYSKANFVSDFRKLCGELRPSYDAFVKVRDINDFHHANDAYLNIVVGNVYYEKFKNFYINNRIDYDNNGKKDLSVLASKLFTKTQTDNKTGIVYWEAHFHNEKEIDANGKERTIKVRDYGTESTFDKIEHYMELNDPLVTQMRYTLSGKQGFFNKITLKAKAKENEDNSDKLFPLKQHLRSDSNKVMDVNKYGGYSDMSNPYFMLVKSEGKKGKHIYSLESIPAIYLKSFKTKEEKIKYLTEVNGLKNSIIIIDKLLMKSILEIPQVSNERNTCGYAKLAFTGRTNDNLVLINLSELHLTFEWKKYYKAISNFYGTNDSAAKKNNKFDAFEEQMKEDPTSDLRRGNTVLTQLNNKCFYSYLIDHVFNKAMYKGIPTIGSSFAKLKDKYEVFCNLNTLEQGKVLIGLIKLLSCKSVRDTDLSLIGLSKHLGLISMSKTLKEGSIIAQESATGMNKYVIYVVE

SEQ ID NO: 830 - protein, 1420 aa, synthetic construct; identical to SEQ ID NO: 111
  REGION 1..1420: note = MG44-445 effector

SEQ ID NO: 831 - protein, 1381 aa, synthetic construct
  REGION 1..1381: note = MG44-446 effector
MEKKYYIGLDLGTSSVGWAATDENYNFLRLKGKTAWGARIFSEAVDCKGRRSFRSSKRRVARRKYRLLLLKNLFAEEMAKVDKTFFLRLENSTYWAEDKAKDAEGNGLGKTLIFKTTEEEREFHKAYPTTWHLRKKLVDNDEQALSDLRLVYLAIHHIMKYRGNFLSDGTKDNEEPSKDTIDRINVILNLLEAKDNESGISDNITYLSKESYNELIETLENKNLNKKKKQDEIKKLFKNVDKTNEDIKVYIDLFKTLVTGGVFSVKKINEEYDKLKIDFNNGFDDNADEISKALGDAYELVLIAKAYNDYISLKDLLGGKPYLSYVMAEIYDEHKKDLKSLKKILVSIDYKHGNEGNNRVYNLVFKPVIVPKEERKDKDGKKNKKLTTPNYASFIQGDDVEKKSVTLENLNKNIKEILEANKQYVDEKDKEEFDRLLDKASNNELFKKQATVSTSLIPHQCHLEELNKILENAGKKYPFIKENSDKIIQLFKFRVPYYYGPLNNESKEHAWIVKNEGKERTKITPWNIDEVVDKGRTREGFFKKLTNSCTYLVGETLLPKVSLVYEKYLALERLNKMQVNGNYLNHSDKMDLLNYVLGNSNTTIENIRKKLASDTGMKINDIVISNIKNNVPFTATSHAFFRKHFNLENSGEFELCEEVIKYATIYADDKKELKKFLSEHRDYFGFDEKLIKEIANLQTNKWGRLSKKFLCGGAKDEMYYTDENGVMYTILGLLEETNQNLQEIVNSGKYGFDEKIKEFNDALTKDETIDEQISKILEGTPALMVRSITQTIKVVDDVIKAAKCEPKKIIMEVTRTDEKKGQEVASRYIQLKKKISEDKEIDDKEREELLSDLEEANKTKKLKGKHLYLYFSQLGIDLYTGKKMKIEEVLEGKYDIDHIVPQSLIKDDSLDNQVLVNKKYNQDVKKDIYPICDEIRSKMLNLWYNYKERGIIKEEKYNRLIRTTDLTDDEINDFVKRQINVVNYSNIQIKRIFELKYHDTEIIFSKAGFPSLLRKEYEIAKMRDLNDAHHAVDAYLNIVCGDILTSLYTDVFYLIKRKKEKKENPTFNMERRLLGYIKKNDLMDKIKSNCLRHDALITFKPDYDSGMFYKQTIFKKSGDKETGLIPLHTKGPMSDVKKYGGYSQLSQSFILAVEYKVKKKTIKKLLRVPTMYVKLYGDDLNKIAKLMIDDEMATDIKVLRKIYLNQKIKYNGCYYLIYTKNEFVNKYKIAYQNYIDNDALVYLNKCLKKTDELDDKDKTEQEIIVNKDGDKLKITKEENLKIFKLIKEQYSKPIYESTPYIAKSKEMPEDVFNNLSIKKQIDTLFNMIKILSRSNEDAKFDKSLNNGSSKYFLKVNTITDDKIYIVNESPSGLFKGKEELI

SEQ ID NO: 832 - protein, 1526 aa, synthetic construct
  REGION 1..1526: note = MG44-447 effector
MARRRRRIILLRELFQPEMDKIDPNFFRRLDQSNLWNEDKDKELQMEHNFLFNDKDLTDKEYYKDFPTIYHLRKAMVNGLTINGHYYDPKKQFDIREVYLVLAHMIKYRGNFLMEGDVQGSVVDPTYLKQCFDNIDNLIKNSIDEDNADKEDDDKIISSEYCFNVDIKRADRLINLFKNESGKQNLKDSEKIEFGKNLTGIRQSLLSLINGSAVSLKDLLPKDQILDEEFGKNKIDFSKESFENDLDSYNLNDFYSQVLLEAKKIYDFRILAHLLHDNRLLCDAMVNVYKEHKEQLAALKRLYKKFATKEQYYFMFRDPKILGLGDSNGKNKKKSKVKNQPKASYVSYIGYTKTSGKRKYTGAHVTKEETIDDLIKQIKDDIGSSIGKYAKYIISKENAYKKDKKGKETLKVGAYKVRLSNNNPNNEETIFYTANDETLIGNEKKDNPYFSEDSKEKEDSVLIMKVLESKIRFLPRQNSRNNGVFPYQLNLNEMRTIIENQSKYYPFLKDKAPSFPDGKTEEYKIVSLLKFKMPYYIGPLSQPNNYVRDDKRDNHWVQFKGENNQGIINPWNFSQIVDMEGTADKFINNLTNYCTYIFGENTLPKESLIFQAYKVLNDLNNLKVNGSLISKEDKDYIIQNVYLKKKKIKGKDIVNALKNKYKLSDEDPTVTTKGSGKSIGEDEVDLTMFNSSLSSFIDMSNSNAFGPEFYKDSSKFELAEKVIELITIVEDKDLLKERLKKLGLSDNQVNYLFKQKYSGWAPLSRKLLDGITIDCVNENTGEAYPVTIIDVMRDTSLNFMEIYETKESQFSGFKEKVAELNDEKNICRDDLIDESYASPAMKRSVRQTFKVIDELKSTLKINHFERIFVEATRAPGEAGKMVKSRKKQLEVAYDAAKDLVDQELRDDLEKQTDDQLRRKKVYLYFMQLGKSVYSGEKIDLNELDKKYDIDHIIPQAKLKDDSFNNMVLVERELNNKKQDEYPIPSTIISEQGRNWILKLSNIKDKNKRFYLMPKDKTDRLLRPESKQLTSDELNGFINRQLTLTNQSVKAVCDILKMTEKGSEIVYSKANFVSDFRKLCGELRPSYDAFVKVRDINDFHHANDAYLNIVVGNVYYEKFKNFYINNRIDYDNNGKKDLSVLASKLFTKTQIDDKTGIVYWEAHFHNEKETDYNGKERTIKVRDKGTDSTFDKIEHYMELNDPLVTQMLYTLSGKQGFFNKITLKAKAKENEDNSGKLFPLKQHLRSDNNKVMDVNKYGGYSDMSNPYFMLVKSDGKKGEHIYSLESIPMICLKSFKNEKDKIEYLVKVNGLNNPVIIVDKLLMKSTLEIPQVSNDGNICGCTKLAFTGRTNNNVVLINLSELHLPLEWKKYYKKISNFYETNASAAEKKNHNFDVFEEQMKEDPTSDLKSGAIVLTQFDNKRFYSYLAGNVFAKAMYKGIPTIGSSFAKLKDKYEVFCNLNTLEQGKVLIGLIKLLSCKSVQGTDLSLIGLSENLGLISMSKTLEEGCSIVQESATGLNRFVIYVVE

SEQ ID NO: 833 - protein, 1347 aa, synthetic construct; identical to SEQ ID NO: 115
  REGION 1..1347: note = MG44-448 effector

SEQ ID NO: 834 - protein, 1420 aa, synthetic construct; identical to SEQ ID NO: 114
  REGION 1..1420: note = MG44-449 effector

SEQ ID NO: 835 - protein, 1386 aa, synthetic construct
  REGION 1..1386: note = MG44-450 effector
MAKQKILCGLDIGTNSVGWCVTNENNKVIKKQGKSLWGVRMFEEAKDAKERRGFRSSRRRLKRRKERLSLLQSLFSIPMNEVDASFFYRLSNSFYHNEDREHPFQYTLFNSVNYTDKQYYDEFPTIYHLRKHLLESKEKEDLRFIYLALHHMIKYRGNFLSEGTSFKPLDKESADSDFRALQALIEEESRFEGENISYDDNIFEELKIANKNIKRLGDLQDRFNELLNPLKNGFIKSNIIPLMLGKKIKIKNLKLEDSEEKLELKEVCPADENYEDNIQLILASYPEEENLVEILLLLQKIYQFFLLGKLLGDHQYLCNAMVERYEKHHSDLKQLKAYIRKYHNEDYGRLFRKPRKKGEKEEANYSSYVGSCIVNGEEPCRFGRGGKQEEFFKLIKSILAQDNNQEAKDIIQSIDNKDYLPLLNSTSNGVFPYQLNLLEMKVILENQSKYYEFLNERDEDGTIADKIISLLTFKIPYYVGPLSNKASHSWIVRKEGKIYPWNFYRMVKKDDTAAEFIKRMLNRCSYLPSEYCLPKDSLIFTYYNVLSFLNKLQVNGDYLDYEEKMELISLFKTKRKVNVKEIENFFKHKNPGTEVSITTSNGKGLSNIACNMSSYYDFANIYSPEYVDSHTDEIEAIIQDIVIFEDKQILEERLKNTHGIEDISIIKKIKGLNYTKYGRLSKELLVGLKAANQETGELYGSILHIMEHSNMNLQEIIHAEEFNFQALIDDYNQAHSSSDKKDTIEGYVDTLYVNPGMRRGLIQAYKIIEELEKILKRPIDEFYVECSRQNKTKKGPNSSRKQQLIKLYKDAISATKDALEFKKLLNRLEEVDENQFQSDKFYLYFLQMGRCMYSSDPIELDSLFDTSKYDIDHIIPQSLIKDDSFTNRVLVKQELNREKTAVYPIQSSLLFHGDKSKAFAFYRYLKDMKLMSEDKFARLTRTQPLKDEEYAAFANRQLVFTNQAVAGLIGAIQYFKKDSDHMPRIIYSKAENVSDFRKVFELVKSRTANNFHHAHDAYLNIIVGRTLDSYFSPFKQNKDTIHQMHLEKKTTNPLKVFTSNYKVFDLSGNLVWDKENSLKEIRHQLYERYDILTTTRTYQGTTLFEKVTIYKKGEGNIGVKASGPLANASEYGGLEGFAFGFYTLIKTNKNYILEAIPTLFKNDIKEYLSTLYKEDYEIIVPILNINSVIMEGKKKYCITGKTGNQYVIKNLLERRFTYRELTIIHKLDKIQERLTKNKISLKGNETKEDLKKIGLYLKDNYLIVSIAKNKDVKQIELSNDECTELYDSLNNILNKEIYAYSASSTISTLLNEQRDYFEKSSIALKIKVLLNLLAYLKCNERKSVDLTLIYGKSKMGTLYLGKKIKPCKIIAESITGFYTKVIWEIK

SEQ ID NO: 836 - protein, 1919 aa, synthetic construct
  REGION 1..1919: note = MG44-451 effector
MAKQKILCGLDIGTNSVGWCVTNENNKVIKKQGKSLWGVRMFEEAKDAKERRGFRSSRRRLKRRKERLSLLQSLFSIPMNEVDASFFYRLSNSFYHNEDREHPFQYTLFNSVNYTDKQYYDEFPTIYHLRKHLLESKEKEDLRFIYLALHHMIKYRGNFLSEGTSFKPLDKESADSDFRALQALIEEESRFEGENISYDDNIFEELKIANKNIKRLGDLQDRFNELLNPLKNGFIKSNIIPLMLGKKIKIKNLKLEDSEEKLELKEVCPADENYEDNIQLILASYPEEENLVEILLLLQKIYQFFLLGKLLGDHQYLCNAMVERYEKHHSDLKQLKAYIRKYHNEDYGRLFRKPRKKGEKEEANYSSYVGSCIVNGEEPCRFGRGGKQEEFFKLIKSILAQDNNQEAKDIIQSIDNKDYLPLLNSTSNGVFPYQLNLLEMKVILENQSKYYEFLNERDEDGTIADKIISLLTFKIPYYVGPLSNKASHSWIVRKEGKIYPWNFYRMVKKDDTAAEFIKRMLNRCSYLPSEYCLPKDSLIFTYYNVLSFLNKLQVNGDYLDYEEKMELISLFKTKRKVNVKEIENFFKHKNPGTEVSITTSNGKGLSNIACNMSSYYDFANIYSPEYVDSHTDEIEAIIQDIVIFEDKQILEERLKNTHGIEDISIIKKIKGLNYTKYGRLSKELLVGLKAANQETGELYGSILHIMEHSNMNLQEIIHAEEFNFQALIDDYNQAHSSSDKKDTIEGYVDTLYVNPGMRRGLIQAYKIIEELEKILKRPIDEFYVECSRQNKTKKGPNSSRKQQLIKLYKDAISATKDALEFKKLLNRLEEVDENQFQSDKFYLYFLQMGRCMYSSDPIELDSLFDTSKYDIDHIIPQSLIKDDSFTNRVLVKQELNREKTAVYPIQSSLLFHGDKSKAFAFYRYLKDMKLMSEDKFARLTRTQPLKDEEYAAFANRQLVFTNQAVAGLIGAIQYFKKDSDHMPRIIYSKAENVSDFRKVFELVKSRTANNFHHAHDAYLNIIVGRTLDSYFSPFKQNKDTIHQMHLEKKTTNPLKVFTSNYKVFDLSGNLVWDKENSLKEIRHQLYERYDILTTTRTYQGTTLFEKVTIYKKGEGNIGVKASGPLANASEYGGLEGFAFGFYTLIKTNKNYILEAIPTLFKNDIKEYLSTLYKEDYEIIVPILNINSVIMEGKKKYCITGKTGNQYVIKNLLERRFTYRELTIIHKLDKIQERLTKNKISLKGNETKEDLKKIGLYLKDNYLIVSIAKNKDVKQIELSNDECTELYDSLNNILNKEIYAYSASSTISTLLNEQRDYFEKSSIALKIKVLLNLLAYLKCNERKSVDLTLIYGKSKMGTLYLGKKIKPCKIIAESITGFYTKVIWEIKTQLGKCMYSLEDIDISDLTNNYHYDIDHIYPQSIIKDDSLSNRVLVDKKKNAAKTDKFLFEAKVLNPKAQQFYKKLLSLELISKEKYRRLTQKEISKDELEGFVNRQLVSTNQSVMGLIKLLKEYYKVDEKNIIYSKGENVSDFRHTFDLVKSRTANNFHHAHDAYLNVVVGGILNKYYTSRRFYQFSDIARIENEGESLNPSRIFTKRDILKANGKVIWDKKEDIKRIEKDLYHRFDITETIRTYNPNKMYSKVTILPKGEGESAVPFQTTTPRVDVEKYGGITSNKFSRYVIIEAHGKKGLDTILEAIPKTACGDNNKIEKDIDNYIASLDEYQKYTSYKVVNYNIKANVVIQEGSFKYIITGKSGNQYVLQNVQDRFFSKKAMITIKNIDKYLNNKKLGIIMAKDNEKIIVSPARGKNNEEIFLGKTELVNLLKEIKTMYSKDIYSFSAIQNIVNNIDCSIDYSIDDFIIICNNLLQILKTNERKNADLRLIHLSGNSGTLYLGKKLKSGMKFIWQSITGYYEEILYEVK

SEQ ID NO: 837 - protein, 1455 aa, synthetic construct; identical to SEQ ID NO: 40
  REGION 1..1455: note = MG44-451 effector

SEQ ID NO: 838 - protein, 1355 aa, synthetic construct
  REGION 1..1355: note = MG44-453 effector
MSEKLFVGLDIGTNSVGWTVTDEEYNLKRLKGKTAWGSRIFQEAKSKKETRNIREKRRRMNRRKYRLTLLQNLFIEEIKKIDSTFFIRLDNASYLAEDKVNKGIGKNLIFKDKQDEIKFYKTYPTIWHLRKALINGEDNALSNLKYIYLAIHHIIKYRGHFLFDGDLSYQQLDEKLIIDLNEYLKEKCDSFSFVNNETDFISSEKTNDLKNILLDNNKNKISKQKSIKELFDAHDDEKIQARIQMFSVIVTGSSYKLSKLDKSYESSICFDSNYEDSIDKIKLELQDDFYLVDIAKRIFDFISLNELLKNNDYLSYAMVKVYEKHKEDLKKLKKIILNIDKNNHERKSRLYDNLFKKDFDNNYAELVNVGTSIKKRIKLEDFNKLICKILEENSQYIHDQDKKDYDYLLKQAKENELLKIIAHVSTSRIPHQLHLNELKIIIENASIYHPFLKEIKEKLILLFQYKIPYTYGPLNSNSPFSNIVRIRNEKATPWNIHELIDENKTREKFMNKLTNNCSYLYGEKVLPKSSLTFETFLILEKLNVMMVNGDYLSFSEKEEVYQYIISNGKDKTTLTQIRSFLASKSNTSIHNILLSNIKEDSLFEARSHTHLSKFFNLNQNPKQIEYYIYLATVYADDKNGLKKILEKEHSELTKEQIKCLLTLPTNKWAPLSYKLLNEIYYIDYDTGIALSILQAMKEKNCNFQMLLYHPIYHFNKLIEDYNASVKGDISSDEMIDEILQNVPSISQRSIHQALLVLNDISKASSQNINKIFIEVTRKDDEEKKKKETDSREKEIYNFIQQLSKEVQNTLITSFNVETLQEEFKLLEKTKLKSKHIYLYFKQMGLDMYTGEKISLDDLLKHDNYDIDHIIPQSLIKDDSLDNLVLVSKNINQKVKGDSYPLPIQLQNEKTKKLWKYLLKMKAISDNKYANLMRTSKISLEEIERFVNRQINIINYTNIALRDILKLKYPQSEIIFSKAHYPSFIRNYLQIIKNRNVNDTHHAIDAYLNVFCGNTLSKSFYNIKKIYDEKVIEGQTKTFNMEKILEYELDKKDSQNISLMDKIKSNCLRHDIIVTFKCDYNNGAFYKETIWPHDEKTLIPIHTKNDNPMNNPYKYGGYKDLAQAYLLAVQYENKNKIEKYILRVPLLLDKKYGNDLNELVKYLIKKENAKNIKILRKIYLNQKIKYEKGIYLIYTSNEITNKYKMAFQNYIDNQDLAYLQKTQNKYNEINIDLPSQEFVLNRKGEIFVISKKRNLEIFDKLIQSAKKEVYNTCNYIVAMRDLDRAIFESIDLKKQLNTLNTMINCLSRNNELCKFEKEFTNMPKTFKFLPTMNITDKSITIIYESPTGLFSHEVKI

SEQ ID NO: 839 - protein, 1378 aa, synthetic construct
  REGION 1..1378: note = MG44-454 effector
MEKKYYIGLDLGTSSVGWAATDENYNFLRLKGKTAWGARIFSEAVDCKGRRSFRSSKRRVARRKYRLLLLKNLFAEEMAKVDKTFFLRLENSTYWAEDKAKDDEGNDLGKTLIFKTTEEEREFHKTYPTTWHLRKKLVDNDEQALSDLRLVYLAIHHIMKYRGNFLSDGTKDNEEPSKDTIDRINVILNLLEAKDNESGISDNITYLSKESYSELIETLEDKNLNKTKKQDKIKKLFKNVNKTNEDIKVYIDLFKTLVTGGVFSVKKINEEYDKLKIDFNNSFDDNADEISKALGDAYELVLIAKAYNDYISLKDLLGGNPYLSYVMADIYDEHKKDLKSLKKILVSIDYNLGNEGNNRIYNLVFKPVIVPKEERKDKDGKKNKKLTTPNYASFIQGDDVEKKSVTLENLNKNIKEILEANKQYVDEIDKEEFDRLLDKASNNELFKKQATVSTSLIPHQCHLKELKIILENAGKKYQFIKENSDKIIQLFKFRVPYYYGPLNNESKEHAWIVKNEGKERTKITPWNIDEVVDKGRTREGFFKKLTNSCTYLVGETVLPKVSLVYEKYLALERLNKMQVNGNYLNHKDKIDLLNYVLGNSNTTIENIRKKLASDTGMKINDIVISNIKNNVPFTATSHAFFRKHFNLENSEEFELCEEVIKYATIYADDKKELKKFLSENFSFDEKLIKEIANLQTNKWGRLSKKFLCGGAKDEMYYTDENGVMYTILGLLEETNQNLQEIVNSGKYGFDEKIKEFNDALTKDETIDEQISKILEGTPALMVRSITQTMKVVDDVIKAAKCEPKKIIMEVTRTDEKKGQEVASRYIQLKKKISEDKGIDDKEREELLSDLEEANKTKKLKGKHLYLYFSQLGIDLYTGKKMKIEEVLEGKYDIDHIVPQSLIKDDSLDNQVLVNKKYNQDVKKDIYPICDEIRSKMLNLWYNYKERGIIKEEKYNRLIRTTDLTDDEINDFVKRQINVVNYSNIQIKRIFELKYPDTEIIFSKAGFPSLLRKEYEIAKMRDLNDAHHAVDAYLNIVCGDILTSLYTDVFYLIKRKKEKKENPTFNMERRLLGYIKKNDLMNKIKSNCLRHDALITFKPDYDSGMFYKQTIFKKSGDKETGLIPLHTKGPMSDVKKYGGYSQLSQSFILAVEYKVKKKTIKKLLRVPTMYVKLYGDDLNKIAKLIVDDEKATDIKVLRKIYLNQKIKYNGCYYLIYTNNEFVNKYKMAYQNYIDNDALVYLNKCLKKTDELDDKDKTEQEIIVNKDGDKLKITKEENLKIFKLIKEQYSKPIYESTPYIAKSKEMPEDAFNNLSIKKQIDTLFNMIKILSRSNEDAKFDKSLNNGSSKCFLKVNTITDDKIYIVNESPSGLFKGKEELI

SEQ ID NO: 840 - protein, 1411 aa, synthetic construct
  REGION 1..1411: note = MG44-455 effector
MEEQNTKKYYVGIDLGTNSCGWAVTDEEYNLRRLKGKDAFGARLFKEASVAKGRRTKRTNRRRMARRKFRIELLNSILGPAIENVDPNFLIRLKYSTFDVEDKRKASGKEINSYPLFPTKKQEKEFYKEYPTIWHLRLARIKGDEKAYSDIRYVYLALHHIIKYRGNFLWEGARNPQDDSKLNNVLDDLNLAILNLPKEEEENGNAELSHEKYQQLYTILTNHEGKKAQQKSIRSLLDISDENQKKYWDLFSKAVTGGKFSPLEQDEDDKTSFDFPHLSDDKLPECQEKMGDEFPIIDCAKKIYDFFTLKSLIGEHASEDPRSISASMVYTYDQHKQDLRAAKNALHAIDKKLGQFNAEGSYYYQFFKDPKAEHNYAAYVSVDSSIDRGKNKTNDDLIKEFQKLVKDNVDVINPEDWKILNAHINSANKDENTFMPLIAHVSTSVIPNQLHKNERMIILKNASKYYPSIFSDDTCNKIKQIFEYKIPFYYGPLAGEHSNVIRNDPNNNERITPYNIKDIVNDEKTRTNFRNKLTNNCSRLFGEPVRPKSSLDYEEYIILDRLNKILVNDHELSGKDKEDVLSYILSNGKTTKKNLVRHLALRYGRKDNDIRIAKMDADLPFTASTHAYLKKLGFDLVKDHDLLEDIILLATVYSENKYDLGNVLKAKYPQFSQKQISQLKARKTNKWGSLSRKFLTGLHPIDKDGVINDGTNILEIRRNTNQNLNEILYNSEYHYQDAIKIENDEYFNNTKVDKVQEVLDNTPAIFRRSCYQCLRILDEIKSITKADPEKIFFEVTRQDLLNKDKKKKDSRKEKLQAIYEQLKDLDKVPNVNKKLLLDNLNNSSIVDDKTLRGKHLYLYFMQLGLDLYTGKPIKIAEVLSGVTYDTDHIVPQSLIKDDSLDNLVLVNKEDNQKTKSDVYPIPKYIKTPEVVRLWKYLHEKKRMSDKKYNNLRRSTRLDEKEINGFVNRQINSVDYSNISLKDLVNIIYPNTTVVFSKAQYPSERRKEYHRPKLRELNDAHHARDAYLNIVCGNILSTEFSEKRLPMLYAQKKQEIEHKLADPSWNKDKSTVEKSFNMIKMLERHRVKDDMALAKKCQAVFNKHSALLTYALTYGDPSFYNANATSPKEKKGKYDTLVPIHTDPNSPYQNVAKYGGYDSAGTAYRYLVSYKTKKGKKEKHNLELLNVKYLYLSKYGKDEEALKKQLISDNELQNANDIKFLAKVYNGQKTIYRNSIFKIKPYNVSQISLENIYSIYMDDCFDDKELYTEYLKFWSKHIYLLQGLPIEQSELKVFTDKEQKNERIISKAKSLLILNRIKSISSQKYFLYGFFKKIQDITEEEFRSLSRSNQILALINLLLLFTSPDKAKPGDYISSFKTASFEYKPSLNLKADITLIYDSFTGLYSRKVTYKL

SEQ ID NO: 841 - protein, 1378 aa, synthetic construct
  REGION 1..1378: note = MG44-456 effector
MEKKYYIGLDLGTSSVGWAATDENYNFLRLKGKTAWGARIFSEAVDCKGRRSFRSSKRRVARRKYRLLLLKNLFAEEMAKVDKTFFLRLENSTYWAEDKAKDDEGNDLGKTLIFKTTEEEREFHKTYPTTWHLRKKLVDNDEQALSDLRLVYLAIHHIMKYRGNFLSDGTKDNEEPSKDTIDRINVILNLLEAKDNESGISDNITYLSKESYSELIETLEDKNLNKTKKQDKIKKLFKNVNKTNEDIKVYIDLFKTLVTGGVFSVKKINEEYDKLKIDFNNGFDDNADEISKALGDAYELVLIAKAYNDYISLKDLLGGNPYLSYVMADIYDEHKKDLKSLKKILVSIDYNLGNEGNNRIYNLVFKPVIVPKEERKDKDGKKNKKLTTPNYASFIQGDDVEKKSVTLENLNKNIKEILEANKQYVDEIDKEEFDRLLDKASNNELFKKQATVSTSLIPHQCHLKELKIILENAGKKYQFIKENSDKIIQLFKFRVPYYYGPLNNESKEHAWIVKNEGKERTKITPWNIDEVVDKGRTREGFFKKLTNSCTYLVGETVLPKVSLVYEKYLALERLNKMQVNGNYLNHKDKIDLLNYVLGNSNTTIENIRKKLASDTGMKINDIVISNIKNNVPFTATSHAFFRKHFNLENSEEFELCEEVIKYATIYADDKKELKKFLSENFSFDEKLIKEIANLQTNKWGRLSKKFLCGGAKDEMYYTDENGVMYTILGLLEETNQNLQEIVNSGKYGFDEKIKEFNDALTKDETIDEQISKILEGTPALMVRSITQTMKVVDDVIKAAKCEPKKIIMEVTRTDEKKGQEVASRYIQLKKKISEDKGIDDKEREELLSDLEEANKTKKLKGKHLYLYFSQLGIDLYTGKKMKIEEVLEGKYDIDHIVPQSLIKDDSLDNQVLVNKKYNQDVKKDIYPICDEIRSKMLNLWYNYKERGIIKEEKYNRLIRTTDLTDDEINDFVKRQINVVNYSNIQIKRIFELKYPDTEIIFSKAGFPSLLRKEYEIAKMRDLNDAHHAVDAYLNIVCGDILTSLYTDVFYLIKRKKEKKENPTFNMERRLLGYIKKNDLMNKIKSNCLRHDALITFKPDYDSGMFYKQTIFKKSGDKETGLIPLHTKGPMSDVKKYGGYSQLSQSFILAVEYKVKKKTIKKLLRVPTMYVKLYGDDLNKIAKLIVDDEKATDIKVLRKIYLNQKIKYNGCYYLIYTNNEFVNKYKMAYQNYIDNDALVYLNKCLKKTDELDDKDKTEQEIIVNKDGDKLKITKEENLKIFKLIKEQYSKPIYESTPYIAKSKEMPEDAFNNLSIKKQIDTLFNMIKILSRSNEDAKFDKSLNNGSSKCFLKVNTITDDKIYIVNESPSGLFKGKEELI

SEQ ID NO: 842 - protein, 1046 aa, synthetic construct
  REGION 1..1046: note = MG44-457 effector
MNKDYYIGLDIGTNSVGWAVADQDYNLLRLKGTHAWGARIFKEASSKKDTRNFRSSRRRYARRKYRIQLLNQLFAEEINKIDSTFFIRLAYSSYWEEDKIDKGISKSLLFKTREEEILFYKKYKTIWHLRQSLIKNEQEAFQDLRYVYFAIHHIIKYRGNFLLEGNINTNQLNETYIEDLNHFLKDKYMELTKDEFESSSSFISKEQTIDIKNILLDKNKNSRTKNKEIKKLFSSNDILEPYIDFFTTLVTGGKFQLKKLNLDSPIEGEIQLSNPSFEEMEGTLKDDFKLVMIAKQIYDFVSLHDILHDKEFLSDAMVDFYDIHQKDLKKLKNIIISIDKNKGFKDEKERLYYKIFKCKETINYSAFVHKNSNVQRPPIEKFNTEIAKILSENQSFVPANKENDFQDLLKKAKDKELLKTISIQSTSVIPHQLHLNELRIILTNAQKYFPFLNNISEKLELLFTFKVPYYYGPLNDKSPYSNVKRTQYATVTPWNFKDIIDENQTREKFMKKLTNTCFHLMGETVMPKKALAYEDFLIYNRLNTLMVNGNYLSTQDKKQFYEYIISRPKTTLEQLKKEIAKRENLNLLDITFSHIQENIPFEASSHAALMKFFDVEKEQKKLEKLITLATIYADDKKSFKILLEKEKNLTEEQRKVLLNLPTKKWAPFSYKLLNDIYYQDDAGVIFSILDIMRLENKDFQMVLNDEQYHFKDLILQENAQIMQNKTPQDLIDEKLETVPSNVQRSIRQTLLVIDDIIKAANNKMPQKIFIEVTRSNDDSKKGKESISREKELTQFIDELFKDPEINQFPNMDLDKLQKELQELDKIKLKGKHLYLYFKQLGIDLYTGLPIDINEVLDSTKYDLDHIIPQSLLKDDSLDNLVLVNRKINQKEKGNQYPLSAEIRSKNKNLWKYLLKKKAISDKKYDHLTRSSEIKLNEIEDFVSRQINIVNYSNIVIRDILNIKYPDIKVIFSKSQYPSFIRKHLNIVKNRDVNDAHHAVDAYLNIVSGNILSTTFSKKYIIETFNKIKFDDKRTFNMESILENYFK

SEQ ID NO: 843 - protein, 1378 aa, synthetic construct
  REGION 1..1378: note = MG44-458 effector
MEKKYYIGLDLGTSSVGWAATDENYNFLRLKGKTAWGARIFSEAVDCKGRRSFRSSKRRVARRKYRLLLLKNLFAEEMAKVDKTFFLRLENSTYWAEDKAKDSEGNDLGKTLIFKTTEEEREFHKAYPTTWHLRKKLVDNDEQALSDLRLVYLAIHHIMKYRGNFLSDGTKDNEEPSKDTIDRINVILNLLEAKDNESGVSDNITYLSKESYNELIETLEDKNLNKTKKQDKIKKLFKNVDKTNEDIKVYIDLFKTLVTGGVFSVKKINEEYDKLKIDFNNGFDDNADEISKALGDAYELVLIAKAYNDYISLKDLLGGNPYLSYVMADIYDEHKKDLKSLKKILVSIDYNLGNEGNNRIYNLVFKPVIVPKEERKDKDGKKNKKLTTPNYASFIQGDDVEKKSVTLENLNKNIKEILEANKQYVDEIDKEEFDRLLDKASNNELFKKQATVSTSLIPHQCHLKELNKILENAGKKYPFIKENSDKIIQLFKFRVPYYYGPLNNESKEHAWIVKNEGKERTKITPWNIDEVVDKGRTREGFFKKLTNSCTYLVGETVLPKVSLVYEKYLALERLNKMQVNGNYLNHSDKMDLLNYVLGNSIYESTPYIAKSKEMPEDAFNNLSIKKQIDTLFNMIKILSRSNEDAKFDKSINNGSSKCFLKVNTITYDKIYIVNESPSGLFKGKEELINTTIENIRKKLASDTGMKINDIVISNIKNNVPFTATSHAFFRKHFNLENSEEFELCEEVIKYATIYADDKKELKKFLSENFSFDEKLIKEIANLQTNKWGRLSKKFLCGGAKDEMYYTDENGVMYTILGLLEETNQNLQEIVNSGKYGFDEKIKEFNDALTKDETIDEQISKILEGTPALMVRSITQTMKVVDDVIKAAKCEPKKIIMEVTRTDEKKGQEVASRYIQLKKKISEDKGIDDKEREELLSDLEEANKTKKLKGKHLYLYFSQLGIDLYTGKKMKIEEVLEGKYDIDHIVPQSLIKDDSLDNQVLVNKKYNQDVKKDIYPICDEIRSKMLNLWYNYKERGIIKEEKYNRLIRTTDLTDDEINDFVKRQINVVNYSNIQIKRIFELKYPDTEIIFSKAGFPSLLRKEYEIAKMRDLNDAHHAVDAYLNIVCGDILTSLYTDVFYLIKRKKEKKENPTFNMERRLLGYIKKNDLMDKIKSNCLRHDALITFKPDYDSGMFYKQTIFKKSGDKETGLIPLHTKGPMSDVKKYGGYSQLSQSFILAVEYKVKKKTIKKLLRVPTMYVKLYGDDLNKIAKLIVDDEKATDIKVLRKIYLNQKIKYNGCYYLIYTNNEFVNKYKMAYQNYIDNDALVYLNKCLKKTDELDDKDNTEQEIIVNKDGDKLKITKEENLKIFKLIKEQYSKP

SEQ ID NO: 844 - protein, 1393 aa, synthetic construct
  REGION 1..1393: note = MG44-459 effector
MKNNEETLKKLRLGLDIGTNSVGYALLDENNKLIKKNGHTFWGVRMFDEAETAKDRGSYRKSRRRLLRRKERMEILRSFFTKEICDIDPTFFERLDDSFYYKEDKKNKNTYNLFTSEYTDKDFYLEYPTIYHLRKAMQEEDKKFDIRMVYLAIAHIIKYRGNFLYPGEEFSTSEYTSIKQFFLDFNDILDELSNELEDNEDYSAEYFDKIENINDDFLEKLKVILMEIKGISNKKKELLDLFNVSKKSIYNELVIPFISGSAKVNISSLSVIKNSKYPKTEISLGSEELEGQVEEAISVALEIKSVLEMIIKIKEISDFYFINKILSDSKTISESMVKMYDEHNEDLKKLKGFFKKYAEDQYNEIFKIRDEKLANYVAYVGFNKLRKNKVERFKHASREEFYGYLKQKLNNIKYAEAQEEIKYFIDKIDNNEFLLKQNSNQNGAFPMQLHLKELKTILNNQEKYYPFLSEGNDGYSIKEKIILTFKYKIPYYVGPLNKESKYSWVVREDEKIYPWNFDKVVKLDETAEKFILRMQNNCTYLKGDNDYCLPKNSLIFSEYSCLSYLNKLSINGKPIDPIMKSKIFNEVFLIKKQPTKKDIIEFIKTNYNADALTTTEKELPEATCNMASYIKMKEIFGKDFNDNKEMIENIIKDITIFEDKSILGNRLKELYKLNNDRIKQIKGLNYKGYSRLSKNLLVGLQIVDNQTGEIKGNVIEVMRKTNLNLQEILYLDGYRLIDAIDEYNRKNSLNDSYLCARDYIAENLVISPSFKRALIQTCSIIQEIERIFHKKIDEFYVEVTRTNKDKNKGKTTSSRYDKIKKIYSSCQELAMAYNFDMKRLKNELESNKDNLKSDILYFYFTQLGKCMYSLEDIDISDLTNNYHYDIDHIYPQSIIKDDSLSNRVLVDKKKNAAKTDKFLFEAKVLNPKAQQFYKKLLSLELISKEKYRRLTQKEISKDELEGFVNRQLVSTNQSVMGLIKLLKEYYKVDEKNIIYSKGENVSDFRHTFDLVKSRTANNFHHAHDAYLNVVVGGILNKYYTSRRFYQFSDIARIENEGESLNPSRIFTKRDKLKANGKVIWDKKEDIKRIEKDLYHRFDITETIRTYNPNKMYSKVTILPKGEGESAVPFQTTTPRVDVEKYGGITSNKFSRYVIIEAHGKKGLDTILEAIPKTACGDNNKIEKDIDNYIASLDEYQKYTSYKVVNYNIKANVVIQEGSFKYIITGKSGNQYVLQNVQDRFFSKKAMITIKNIDKYLNNKKLGIIMAKDNKKIIVSPARGKNNEEIFLGKTELVNLLKEIKTMYSKDIYSFSAIQNIVNNIDCSIDYSIDDFIIICNNLLQILKTNERKNADLRLIHLSGNSGTLYLGKKLKSGMKFIWQSITGYYEEILYEVK

SEQ ID NO: 845 - protein, 788 aa, synthetic construct; identical to SEQ ID NO: 53
  REGION 1..788: note = MG44-460 effector

SEQ ID NO: 846 - protein, 544 aa, synthetic construct; identical to SEQ ID NO: 54
  REGION 1..544: note = MG44-461 effector

SEQ ID NO: 847 - protein, 1378 aa, synthetic construct
  REGION 1..1378: note = MG44-462 effector
MEKKYYIGLDLGTSSVGWAATDENYNFLRLKGKTAWGARIFSEAVDCKGRRSFRSSKRRVARRKYRLLLLKNLFAEEMAKVDKTFFLRLENSTYWAEDKAKDSEGNDLGKTLIFKTTEEEREFHKAYPTTWHLRKKLVDNDEQALSDLRLVYLAIHHIMKYRGNFLSDGTKDNEEPSKDTIDRINVILNLLEAKDNESGISDNITYLSKESYNELIETLEDKNLNKTKKQDKIKKLFKNVDKTNEDIKVYIDLFKTLVTGGVFSVKKINEEYDKLKIDFNNGFDDNADEISKALGDAYELVLIAKAYNDYISLKDLLGGKPYLSYVMADIYDEHKKDLKSLKKILVSIDYKHGNEGNNRVYNLVFKPVIVPKEERKDKDGKKNKKLTTPNYASFIQGDDVEKKSVTLENLNKNIKEILEANKQYVDEIDKEEFDRLLDKANNNELFKKQATVSTSLIPHQCHLNELNKILENAGKKYPFIKENSDKIIQLFKFRVPYYYGPLNNESKEHAWIVKNEGKERTKITPWNIDEVVDKGRTREGFFKKLTNSCTYLVGETVLPKVSLVYEKYLALERLNKMQVNGNYLNHKDKIDLLNYILGNSNTTIENIRKKLASDTGMKINDIVISNIKNNVPFTATSHAFFRKHFNLENTKEFELCEEVIKYATIYADDKKELKKFLSENFSFDEKLIKEIANLQTNKWGRLSKKFLCGGAKDEMYYTDENGVMYTILGLLEETNQNLQEIVNSGKYGFDEKIKEFNDALTKDETIDEQISKILEGTPALMVRSITQTIKVVDDVIKAAKCEPKKIIMEVTRIDEKKGQEVASRYIQLKKKISEDKGIDDKEREELLSDLEEANKTKKLKGKHLYLYFSQLGIDLYTGKKMKIEEVLEGKYDIDHIVPQSLIKDDSLDNQVLVNKKYNQDVKKDIYPICDEIRSKMLNLWYNYKERGIIKEEKYNRLIRTTDLTDDEINDFVKRQINVVNYSNIQIKRIFELKYPDTEIIFSKAGFPSLLRKEYEIAKMRDLNDAHHAVDAYLNIVCGDILTSLYTDVFYLIKRKKEKKENPTFNMERRLLGYIKKNDLIDKIKSNCLRHDALITFKPDYDSGMFYKQTIFKKSGDKETGLIPLHTKGPMSDVKKYGGYSSLSQSYLLAVEYKVKKKTIKKLLRVPTMYVKLYGDDLNTIAKLIVDDEKAIDIKVLRKIYLNQKIKYNGCYYLIYTNNEIQNKYKMAYQNYIDNDALVYLNKCLKKIDELDDKDKIEQEIIVNKDGDKLKITKEENLKIFKLIKEQYSKPIYESTPYIVKSKEMPEDAFSNLSLKNQIDTLFNMIKILSRSNEDAKFDESLKNSGTKYYRVSNNITNLDTYIVNESPSGLFKGKEELI

SEQ ID NO: 848 - protein, 1394 aa, synthetic construct
  REGION 1..1394: note = MG44-463 effector
MDNNKKLFIGLDVGSDSVGWAATDEDYNLCRLKGKTAWGARLFTAASDAKGRRALRVSGRRLARRKRRINLLNTLFDPLLKEVDPTFLQRLEYSTLQNDDPNKPESTRSDTLLFLDKKKEKEFYKAYPTIWHLRRDMINGDEKAFSDIRYLYLAVHHIIKYRGNFLREGEINTDQFDVAEFGLLNDLIGQAVGSTDDDGDEMPFAGIPESNYETFIKTALDKSKGKSQRKKELIALTDSGGNEFAKGLLEMFCTLAVGGKTNTKKLNPKNEDPRFEEVDIIIDKKYDENEANYHDVLGDLFGVVEIAKAVYDFCDLSDILHNQPNLSTAFAAIYDSHKEQKMCLKAICKEIDEAEGHFGTKEGVLHLIFKDPDCATNYCAFTHNDSKQGRCDIQKFNKFVLETIEPKADLIKTNRRGWEQLKTLIEREEMLQTVAIRSTSVIPMQLHKKELVAILNNAIKFDVPGILEIRDQLIELFSFRVPYYCGPLNAKSEFTNMVLKGGVSGPINPWNYKDKIDFEATKKKFMMGLTNKCTYLKDCSVLPSSSLLFRDAMAWDKLNNLRVNGNRLTPDEMKRIYNELVVWRPKTTLSQVKNFIVKHMGGEPSKSGDYVVTGWNDQDAIDNSPRSILASAFHLTDDRNTPEYQMCEDIIYLKTVFTDSEKDAMEAITKKYSLNGDQLTAVKKLKCKGWATLSKEFLTLSSDKACSELNRLIDVMMAGEGNMMEVLHSPKYEFNAKVDRYNDALFEGHDKDDAVEEIVESIPPKMRRSVIQAIRIVKEVSKVAKKDPAVISIEVTREDNDQDKKKKKVTKSRKDQLDEFLKGLVAGEKKTKGNDGSLKEAASDARELLQDYGIDELRGKHLYLYFLQCGIDLYTGEKIDIQRILDGSSYDTDHILPQSLIKDDSLDNLVLVNRATNQHKSNSYPLPPSIQSKMKPTWRRLRDAGMLSAKKYANLTRTTPLTESELNSFVSAQINVVNHSNVAIRDALKVLYPRATLIFSKAQYPSQVRKELSIPKLRDLNDTHHAVDAYLNIVCGDMLTKAFGRMEIIKKAMKSMDEEGEPKASLNMEKFISRSLASKDGVLTDLANKIVANSQRHDFLLTYRFIYQDAEFYKQTIYGTNNSRNLKAETLIPIHDGMDPRKYGGYNEMKAEYNCVATVRGVKKTTRFLVGVPHLLAEQHRQGVDVNDRLIELVPHKISDAVTVDLDHPLPLMALVNAGGLEYLLIGHGEKQVKLLPFTPVFLSLDDASYIENLARYVDKRPELMANNGGTKTSCLTISRNRYSSEEIVFSNDSSLKVLDGLLELSNQSRFDYCTMVTEIRNEQKANELRNKLLESCFADQLKIIQSTLGRFTRRAEQLTGGKVFLKGRGVITSEGLIIVSKSITGLYQTEKKL

SEQ ID NO: 849 - protein, 1465 aa, synthetic construct
  REGION 1..1465: note = MG44-464 effector
MEEKKYYLGLDIGTDSVGFCVTDRDYNIVRKHKVIQYGDHSDYHGNHLWGSRLFDEAETAASRRMARESRRRYQRRKWRIILLQNIFKPEMDKIDPFFFDRLNNSAVHLEDRKEELRDQYLLFNEDYSDKDFYEEYPTIYHLRLDMINHPEKKFDLRLVYLAFAHMIKYRGNFLTEGELSSIGNDPSTVQRLFDELNAIITSINEESELTAMSEIPCDDKIAVQIIDAFKRISKKGEIYDALVSKFNLTGMKSTDFRASVFKLISGSKIALGKLFADLEAEPEILKASVDFAKEDFMDVDLPKLTDDIGAERISLIQKIKEIYNLRILCHLLNGKKYVSEAMVGIYDSHKKQLAELKNLIRKYNPSKYSAFFRKMTGKPSYAGYIGYTDYNSKKNTSNHMTSLDDLYKEIKTILPLDSFDKPDFVFKSETDFDEFKDIRDAIDAQSLLLRQNSKDNGVLPYQLNLIEMREILKNQGQYYPFLLEMDKDFNNPEKQSFKIESILKFKIPYYVGPLSDDEGINKWVQKKQTGVKITPWNFHDVIDEEKTAQAFMENLKNYCTYLMNEPTLARHSLYYSMFILLNEMNKWYVNEAPISTEDKAYLVKEVYFKVRKPSKKMIEEALKRKYGQSVKFASTNGLTNEEKGAKDEDFHANLSSWIDMLNPQGFSERLLHEPALIDKAEDIIYTIAMFEDKTLVRKSLEKMGLTAGQIKYFSGLKYDGWGKLSKKLLCGLKEEKVNNATGEVLEYSILDEMWLTNSNFMELYEKEGSAFKKQVKECNAALQEKPEDLIDQEYTSPMMKRALRQTIKIVDELKRILHIDSFDSYFVESTRSEGEKKRTKSRKKQLQEILESAKKFKSEMDDEYFKSRIERLSKELEARDEDELKGKRLFLYFMQLGRSVYTGEEISLDDLSKEYDIDHIIPQSKVKDDSFTNTVLVERGVNNKKKDQYPIPKDILTNKGIAWIRTLNSLSKLSSVPLMPDMKMKRLLRSINKPLTDEELSGFVKRQLVSTSQSVKAVCDVLKAIDPKAKIVYSMAGLVSEFRAEFGLVKSRDLNDFHHAHDAYLNIVVGNVYNKVFSTGNPDTIRYRKEHFEGFNMDLGYIFRHDQRVYQKDTLIWKAKRYDENGNEPPDGKGTIDLVRKSLGYHDIVVTRMMVTNVGKQGFFNKISIHSAKAGDASYPLKTSGPFACEDYAKKYGGYSDLTNPYASLVKSEGKKGKTAYSLEYVPTIVRKSIGSDQKKLKEYLVQNNGLKKPEILIEKLLKYTIVRIPTEAENGKKGMVRVAITGKTGNSLICINQTQLILPNQYVRTVKRISNLLGTNLSAGQKKDLTFLQKYGKEDIHIDKKNDITRKECEELFDYLTKESYTRPEFEGLPKLSPTIKKLKAKKEAFVELNTLDMAKTLSIMIKMLSCKSCQGLNLKYLAIDMPSAFGDLVFSKILIPGTQIIQTSTTGLFERVLFTVPEE

SEQ ID NO: 850 - protein, 1350 aa, synthetic construct
  REGION 1..1350: note = MG44-465 effector
MAEEIHRVDPTFFMRLDNSFFQKDDREEDFDYTLFNDRNYTDSDYYREYPTIYHLRKHLLESRSKEDIRMIYLALHHMMKYRGNFLSNAKEFEPMNPNDADEYFEELKQSLANTRDGVTIEYDTTKDFSRLKEVFTSEHGITVLKEKLGKILNPNNDAYIKKIVILLIAGGTIGIKDLKFDQTEDLDFKNLCVKDEKFDQYIATLLSTNEEREEEINALASCKKIYEFFLLGKLLGDQCYLSDAMVKRYQMHQEQLRELKAYVKKNHKDKYARIFRKPMRNKSKANGVEKENKKEELNNYAMYIGSNLTGNHKNRTAHCTAEAFYAFLKKELGLTKVKSTQKTKETYESQILDLMSNGEFLPRLNSTDNGVFPYQLNLMEMKEILNRQSEFYPFLLTKDEDGITVKDQILSVLEYKIPYFVGPLIPKEEGNERSKYAWIKRTDEKIRPWNFKKVVDLDETAKNFIYKMLNKCTYLPSCYCLPKDSLLFSYFNVLQILNKTSINGASMPKDFKECIIENLFRKRRKVTKKQLVEFIRAESGDNQAQITTSTGKEMEEINASLASYYDFKDIFGEEYVRSHIEEIEDMIRDIVIFEDKSILEKRLKQVYRIQDKTAIRKIKGLNYSKFSNLSKELLTDLKFYDESSERNCSVLQLLEETNQNLQEILYDETYGFQKKIEEYNKNHSGTGEFETIEEYVKELGAVSPGMKRPLIQAYKICDELEKIIGQPIDEYYVECTRTNRAEKKRTSSRYKKMQELYEEAIKTAGDDYEFKSAYEKFKSADPNQFQSDKYYLYFSQMGKCMYSGEAIDIGELYDTNKYDIDHILPQSMIKDDSLSNRVLVKQSLNRTDKRDQYPIPQSMLFNGNYREAYRFYQSLKEKKLISEEKYHRLIRKEALSEKELSSFVNRQLVSTNQAVKGFINAIRYFKTTESFTPKIIFSKSENVSDFRKKHDLVKCRSANNFHHAHDAYLNIVVGRTIDNYFAPYDPYISHDHRNSVLQEMHANGLTTNPSKIFEQNKEGTKKNITDRDGYVVWDYNQSIQKVKKTIKNRYDILTTQRTYFGNSFFGKMTIMPKGEGNISVKKGWDKQKYGGFKEYSFGSYSLIKVKDQFILEAIPTMLRKRKEEYLRERFGEYEIRLDNLKINTVFEVDKKKFVITGKTGDRYLLMNQKDRIFSSEQMETLRKIDKLFDKLNQKIGPNEEEEEERKKLRECGIKVNDADMVIAPAKNDQAKEMRITQEEAVQIYETFIQLFSKEIYSFSVINKLGCKLEGKKKEFQSLSLFKKVYLIQKINNLLRCNERKTADLRAIGFKEQEGTLTMNQKLSTCRIVFESITGFYRKVVFECKDGVECG

SEQ ID NO: 851 - protein, 1393 aa, synthetic construct
  REGION 1..1393: note = MG44-466 effector
MKNNEETLKKLRLGLDIGTNSVGYALLDENNKLIKKNGHTFWGVRMFDEAETAKDRGSYRKSRRRLLRRKERMEILRSFFTKEICDIDPTFFERLDDSFYYKEDKKNKNTYNLFTSEYTDKDFYLEYPTIYHLRKAMQEEDKKFDIRMVYLAIAHIIKYRGNFLYPGEEFSTSEYTSIKQFFLDFNDILDELSNELEDNEDYSAEYFDKIENINDDFLEKLKVILMEIKGISNKKKELLDLFNVNKKSIYNELVIPFISGSAKVNISSLSVIKNSKYPKTEISLGSEELEGQVEEAISVAPEIKSVLEMIIKIKEISDFYFINKILSDSKTISESMVKMYDEHNEDLKKLKGFFKKYAEDQYNEIFKIRDEKLANYVAYVGFNKLRKNKVERFKHASREEFYGYLKQKLNNIKYAEAQEEIKYFIDKIDNNEFLLKQNSNQNGAFPMQLHLKELKTILNNQEKYYPFLSEGNDGYSIKEKIILTFKYKIPYYVGPLNKESKYSWVVREDEKIYPWNFDKVVKLDETAEKFILRMQNKCTYLKGDNDYCLPKNSLIFSEYSCLSYLNKLSINGKPIDPIMKSKIFNEVFLIKKQPTKKDIIEFIKTNYNADALTTTEKELPEATCNMASYIKMKEIFGKDFNDNKEMIENIIKDITIFEDKSILGNRLKELYKLNNDRIKQIKGLNYKGYSRLSKNLLVGLQIVDNQTGEIKGNVIEVMRKTNLNLQEILYLDGYRLIDAIDEYNRKNSLNDSYLCARDYIAENLVISPSFKRALIQTCSIIQEIERIFHKKIDEFYVEVTRTNKDKNKGKTTSSRYDKIKKIYSSCQELAMAYNFDMKRLKNELESNKDNLKSDILYFYFTQLGKCMYSLEDIDISDLTNNYHYDIDHIYPQSIIKDDSLSNRVLVDKKKNAAKTDKFLFEAKVLNPKAQQFYKKLLSLELISKEKYRRLTQKEISKDELEGFVNRQLVSTNQSVMGLIKLLKEYYKVDEKNIIYSKGENVSDFRHTFDLVKSRTANNFHHAHDAYLNVVVGGILNKYYTSRRFYQFSDIARIENEGESLNPSRIFTKRDILKANGKVIWDKKEDIKRIEKDLYHRFDITETIRTYNPNKMYSKVTILPKGEGESAVPFQTTTPRVDVEKYGGITSNKFSRYVIIEAHGKKGLDTILEAIPKTACGDNNKIEKDIDNYIASLDEYQKYTSYKVVNYNIKANVVIQEGSFKYIITGKSGNQYVLQNVQDRFFSKKAMITIKNIDKYLNNKKLGIIMAKDNEKIIVSPARGKNNEEIFLGKTELVNLLKEIKTMYSKDIYSFSAIQNIVNNIDCSIDYSIDDFIIICNNLLQILKTNERKNADLRLIHLSGNSGTLYLGKKLKSGMKFIWQSITGYYEEILYEVK

SEQ ID NO: 852 - protein, 1393 aa, synthetic construct
  REGION 1..1393: note = MG44-467 effector
MKNNEETLKKLRLGLDIGTNSVGYALLDENNKLIKKNGHTFWGVRMFDEAETAKDRGSYRKSRRRLLRRKERMEILRSFFTKEICDIDPTFFERLDDSFYYKEDKKNKNTYNLFTSEYTDKDFYLEYPTIYHLRKAMQEEDKKFDIRMVYLAIAHIIKYRGNFLYPGEEFSTSEYTSIKQFFLDFNDILDELSNELEDNEDYSAEYFDKIENINDDFLEKLKVILMEIKGISNKKKELLDLFNVNKKSIYNELVIPFISGSAKVNISSLSVIKNSKYPKTEISLGSEELEGQVEEAISVAPEIKSVLEMIIKIKEISDFYFINKILSDSKTISESMVKMYDEHNEDLKKLKGFFKKYAEDQYNEIFKIRDEKLANYVAYVGFNKLRKNKVERFKHASREEFYGYLKQKLNNIKYAEAQEEIKYFIDKIDNNEFLLKQNSNQNGAFPMQLHLKELKTILNNQEKYYPFLSEGNDGYSIKEKIILTFKYKIPYYVGPLNKESKYSWVVREDEKIYPWNFDKVVKLDETAEKFILRMQNKCTYLKGDNDYCLPKNSLIFSEYSCLSYLNKLSINGKPIDPIMKSKIFNEVFLIKKQPTKKDIIEFIKTNYNADALTTTEKELPEATCNMASYIKMKEIFGKDFNDNKEMIENIIKDITIFEDKSILGNRLKELYKLNNDRIKQIKGLNYKGYSRLSKNLLVGLQIVDNQTGEIKGNVIEVMRKTNLNLQEILYLDGYRLIDAIDEYNRKNSLNDSYLCARDYIAENLVISPSFKRALIQTCSIIQEIERIFHKKIDEFYVEVTRTNKDKNKGKTTSSRYDKIKKIYSSCQELAMAYNFDMKRLKNELESNKDNLKSDILYFYFTQLGKCMYSLEDIDISDLTNNYHYDIDHIYPQSIIKDDSLSNRVLVDKKKNAAKTDKFLFEAKVLNPKAQQFYKKLLSLELISKEKYRRLTQKEISKDELEGFVNRQLVSTNQSVMGLIKLLKEYYKVDEKNIIYSKGENVSDFRHTFDLVKSRTANNFHHAHDAYLNVVVGGILNKYYTSRRFYQFSDIARIENEGESLNPSRIFTKRDILKANGKVIWDKKEDIKRIEKDLYHRFDITETIRTYNPNKMYSKVTILPNGEGESAVPFQTTTPRVDVEKYGGITSNKFSRYVIIEAHGKKGLDTILEAIPKTACGDNNKIEKDIDNYIASLDEYQKYTSYKVVNYNIKANVVIQEGSFKYIITGKSGNQYVLQNVQDRFFSKKAMITIKNIDKYLNNKKLGIIMAKDNEKIIVSPARGKNNEEIFLGKTELVNLLKEIKTMYSKDIYSFSAIQNIVNNIDCSIDYSIDDFIIICNNLLQILKTNERKNADLRLIHLSGNSGTLYLGKKLKSGMKFIWQSITGYYEEILYEVK

SEQ ID NO: 853 - protein, 1382 aa, synthetic construct
  REGION 1..1382: note = MG44-468 effector
MEHYSLGLDIGTDSVGWALVDENNDVIKKNGKHLWGVRMFDEASSAQNRRTFRNSRRRLNRRRQRIVLLQKIFFDEINKKDKTFFERLDDSFFKIEDKRNKNVNTLFCDKNYTDRDYKKEYPTIYHLRDALIKTDEPKDIRFIYLAFHHMIKYRGNFLKEGEEFEPSDISLIENFFAELNEELENRALALDEDNMAHDNYYQTIDTSKENFYTDLQNILLAKKGKKETKEDLIHLFGCNKKTFVQEAIAPLLSGSSVNLAKLTIVKEENHEKTEIDLSKEEYLANIEAACQNIPELSSLISLFEGVKMVRDHYELVSILGNHKFLSEAMKEIYESHNKDLAELKKLIKNYLPEDYNYCFRRTQTVIKKGKEHIEPINNYVNYIGFNDYRGKKERFGKIRQEDFYKFIKAELDKIKADEAQETIRNILDKIDKQTYMRKQNSASNGCFPMQLNLMEMDAIIKKQSEHYPFLSEEKDKILSILKFKLPYYVGPLNTSSKYSWVIKKTQDKIYPWNLDKVVDLDETAQKFIRRMQRKCTYLHGENDYCLPQESMIYSAYKCFSYLNKIYVNYKPIQISTKEKVFKDVFLKEKKPTKKSITVAIKAIEGTKEIAITHTEGKELEEVNCNMKSYILFSNLFGEKFEENKEMIEDIISDITLFEDKSILEKRLREKYHLDEAKIKEIKGYNFKDYGRLSKQLLVGFELTNNSTGEVFSNVIELMEKTTLNLQEILYNTEYNLMAEIDKYNKSVNADEATNDFKSYIDNYLYLSPIAKRSLIQSYEIIEELEKIIKHPIERYYVECTRTNQAKKNRVDSRYDKLKKLYTEVKNDADSFNVDMNKLKKQLDDNKDNLRSDKLYFYFTQLGKCMYSLKPIDLDKLISSNDTYDIDHIFPQSLIKDDSLSNRVLTEKSINNNRKSDKFLFETDILEPKCYKFYDMLLKKELISKEKYRRLTLKEISKNELDGFVNRQLVSTNQSVKGLIEVLKACKVNNTADIIYSKAEVVSDFRKDFDLPKSRLANNFHHAHDAYLNVVCGRVVDQYFKAHNYRDIKDYYHLKDQKITTNPQTIFKYDRYVNGSPLWKKEETIAKIKHYLYETFDVFETTRAYIGNELYSKVTIQPAGKGSYPVKVKENDPRKDTEKYGGFSDPSYTFYCVIKCKKKKNQIEYHYVSIPALYKNNIDAYLESKNYKDYEIVLNNLKINTVFKVGKLKFCVTGNTKGSYYIKNLLDRRFDYHSIVTIKKIEKYFDMVKRGNYLKREEDKIILSPARNEKCKEIALENQELEKLYQTIKTMFSKEIYSFSNIVNICGKLPECLNHLNIDDKVYTLNELLRLLKTNERGTADLTTINMSSTCGTLLFNGTIQPGTQIIAESVTGYYTKVLFEVK

SEQ ID NO: 854 - protein, 1378 aa, synthetic construct
  REGION 1..1378: note = MG44-469 effector
MEKKYYIGLDLGTSSVGWAATDENYNFLRLKGKTAWGARIFSEAVDCKGRRSFRSSKRRVARRKYRLLLLKNLFAEEMAKVDKTFFLRLENSTYWAEDKAKDAEGNDLGKTLIFKTTEEEREFHKTYPTTWHLRKKLVDNDEQALSDLRLVYLAIHHIMKYRGNFLSDGTKDNEEPSKDTIDRINVILNLLEAKDNESGISDNITYLSKESYNELIETLENKNLNKTKKQDKIKKLFKNVDKTNEDIKVYIDLFKTLVTGGVFSVKKINEEYDKLKIDFNNGFDDNADEISKALGDAYELVLIAKAYNDYISLKDLLGGNPYLSYVMADIYDEHKKDLKSLKKILVSIDYNLGNEGNNRVYNLVFKPVIVPKEERKDKDGKKNKKLTTPNYASFIQGDDVEKKSVTLENLNKNIKEILEANKQYVDEKDKEEFDRLLDKASNNELFKKQATVSTSLIPHQCHLEELNKILENAGKKYPFIKENSDKIIQLFKFRVPYYYGPLNNESKEHAWIVKNEGKERTKITPWNIDEVVNKEKTREGFFKKLTNSCTYLVGETVLPKVSLVYEKYLALERLNKMQVNGNYLNHSDKMDLLNYVLGNSNTTIENIRKKLASDTGMKINDIVISNIKNNVPFTATSHAFFRKHFNLENSGEFELCEEVIKYATIYADDKKELKKFLSENFSFDEKLIKEIANLQTNKWGRLSKKFLCGGAKDEMYYTDENGVMYTILGLLEETNQNLQEIVNSGKYGFDEKIKEFNDALTKDETIDEQISKILEGTPALMVRSITQTIKVVDDVIKAAKCEPKKIIMEVTRTDEKKGQEVASRYIQLKKKISEDKGIDDKEREELLSDLEEANKTKKLKGKHLYLYFSQLGIDLYTGKKMKIEEVLEGKYDIDHIVPQSLIKDDSLDNQVLVNKKYNQDVKKDIYPICDEIRSKMLNLWYNYKERGIIKEEKYNRLIRTTELTDDEINDFVKRQINVVNYSNVQIKRIFELKYPDTEIIFSKAGFPSLLRKEYEIAKMRDLNDAHHAVDAYLNIVCGDILTSLYTDVFYLIKRKKEKKENPTFNMERRLLGYIKKNDLMNKIKSNCLRHDALITFKPDYDSGMFYKQTIFKKSGDKETGLIPLHTKGPMSDVKKYGGYSSLSQSYLLAVEYKVKKKTIKKLLRVPTMYVKLYGDDLNTIAKLMIDDEMATDIKVLRKIYLNQKIKYNGCYYLIYTKNEFVNKYKMAYQNYIDNDALVYLNKCLKKTDELDDKDKTEQEIIVNKDGDKLKITKEENLKIFKLIKEQYSKPIYESTPYIAKSKEMPEDVFNNLSIKKQIDTLFNMIKILSRSNEDAKFDKSLNNGSSKYFLKVNTITDDKIYIVNESPSGLFKGKEELI

SEQ ID NO: 855 - protein, 1393 aa, synthetic construct
  REGION 1..1393: note = MG44-470 effector
MKNNEETLKKLRLGLDIGTNSVGYALLDENNKLIKKNGHTFWGVRMFDEAETAKDRGSYRKSRRRLLRRKERMEILRSFFTKEICDIDPTFFERLDDSFYYKEDKKNKNTYNLFTSEYTDKDFYLEYPTIYHLRKAMQEEDKKFDIRMVYLAIAHIIKYRGNFLYPGEEFSTSEYTSIKQFFLDFNDILDELSNELEDNEDYSAEYFDKIENINDDFLEKLKVILMEIKGISNKKKELLDLFNVNKKSIYNELVIPFISGSAKVNISSLSVIKNSKYPKTEISLGSEELEGQVEEAISVAPEIKSVLEMIIKIKEISDFYFINKILSDSKTISESMVKMYDEHNEDLKKLKGFFKKYAEDQYNEIFKIRDEKLANYVAYVGFNKLRKNKVERFKHASREEFYGYLKQKLNNIKYAEAQEEIKYFIDKIDNNEFLLKQNSNQNGAFPMQLHLKELKTILNNQEKYYPFLSEGNDGYSIKEKIILTFKYKIPYYVGQLNKESKYSWVVREDEKIYPWNFDKVVKLDETAEKFILRMQNKCTYLKGDNDYCLPKNSLIFSEYSCLSYLNKLSINGKPIDPIMKSKIFNEVFLIKKQPTKKDIIEFIKTNYNADALTTTEKELPEATCNMASYIKMKEIFGKDFNDNKEMIENIIKDITIFEDKSILGNRLKELYKLNNDRIKQIKGLNYKGYSRLSKNLLVGLQIVDNQTGEIKGNVIEVMRKTNLNLQEILYLDGYRLIDAIDEYNRKNSLNDSYLCARDYIAENLVISPSFKRALIQTCSIIQEIERIFHKKIDEFYVEVTRTNKDKNKGKTTSSRYDKIKKIYSSCQELAMAYNFDMKRLKNELESNKDNLKSDILYFYFTQLGKCMYSLEDIDISDLTNNYHYDIDHIYPQSIIKDDSLSNRVLVDKKKNAAKTDKFLFEAKVLNPKAQQFYKKLLSLELISKEKYRRLTQKEISKDELEGFVNRQLVSTNQSVMGLIKLLKEYYKVDEKNIIYSKGENVSDFRHTFDLVKSRTANNFHHAHDAYLNVVVGGILNKYYTSRRFYQFSDIARIENEGESLNPSRIFTKRDILKANGKVIWDKKEDIKRIEKDLYHRFDITETIRTYNPNKMYSKVTILPKGEGESAVPFQTTTPRVDVEKYGGITSNKFSRYVIIEAHGKKGLDTILEAIPKTACGDNNKIEKDIDNYIASLDEYQKYTSYKVVNYNIKANVVIQEGSFKYIITGKSGNQYVLQNVQDRFFSKKAMITIKNIDKYLNNKKLGIIMAKDNEKIIVSPARGKNNEEIFFEKTELVNLLKEIKTMYSKDIYSFSAIQNIVNNIDCSIDYSIDDFIIICNNLLQILKTNERKNADLRLIHLSGNSGTLYLGKKLKSGMKFIWQSITGYYEEILYEVK

SEQ ID NO: 856 - protein, 1425 aa, synthetic construct; identical to SEQ ID NO: 48
  REGION 1..1425: note = MG44-471 effector

SEQ ID NO: 857 - protein, 1378 aa, synthetic construct
  REGION 1..1378: note = MG44-472 effector
MEKKYYIGLDLGTSSVGWAATDENYNFLRLKGKTAWGARIFSEAVDCKGRRSFRSSKRRVARRKYRLLLLKNLFAEEMAKVDKTFFLRLENSTYWAEDKAKDDEGNDLGKTLIFKTTEEEREFHKTYPTTWHLRKKLVDNDEQALSDLRLVYLAIHHIMKYRGNFLSDGTKDNEEPSKDTIDRINVILNLLEAKDNESGISDNITYLSKESYSELIETLEDKNLNKTKKQDKIKKLFKNFNKTNEDIKVYIDLFKTLVTGGVFSVKKINEEYDKLKIDFNNGFDDNADEISKALGDAYELVLIAKAYNDYISLKDLLGGNPYLSYVMADIYDEHKKDLKSLKKILVSIDYNLGNEGNNRIYNLVFKPVIVPKEERKDKDGKKNKKLTTPNYASFIQGDDVEKKSVTLENLNKNIKEILEANKQYVDEIDKEEFDRLLDKASNNELFKKQATVSTSLIPHQCHLKELKIILENAGKKYQFIKENSDKIIQLFKFRVPYYYGPLNNESKEHAWIVKNEGKERTKITPWNIDEVVDKGRTREGFFKKLTNSCTYLVGETVLPKVSLVYEKYLALERLNKMQVNGNYLNHKDKIDLLNYVLGNSNTTIENIRKKLASDTGMKINDIVISNIKNNVPFTATSHAFFRKHFNLENSEEFELCEEVIKYATIYADDKKELKKFLSENFSFDEKLIKEIANLQTNKWGRLSKKFLCGGAKDEMYYTDENGVMYTILGLLEETNQNLQEIVNSGKYGFDEKIKEFNDALTKDETIDEQISKILEGTPALMVRSITQTMKVVDDVIKAAKCEPKKIIMEVTRTDEKKGQEVASRYIQLKKKISEDKGIDDKEREELLSDLEEANKTKKLKGKHLYLYFSQLGIDLYTGKKMKIEEVLEGKYDIDHIVPQSLIKDDSLDNQVLVNKKYNQDVKKDIYPICDEIRSKMLNLWYNYKERGIIKEEKYNRLIRTTDLTDDEINDFVKRQINVVNYSNIQIKRIFELKYPDTEIIFSKAGFPSLLRKEYEIAKMRDLNDANHAVDAYLNIVCGDILTSLYTDVFYLIKRKKEKKENPTFNMERRLLGYIKKNDLMNKIKSNCLRHDALITFKPDYDSGMFYKQTIFKKSGDKETGLIPLHTKGPMSDVKKYGGYSQLSQSFILAVEYKVKKKTIKKLLRVPTMYVKLYGDDLNKIAKLIVDDEKATDIKVLRKIYLNQKIKYNGCYYLIYTNNEFVNKYKMAYQNYIDNDALVYLNKCLKKTDELDDKDKTEQEIIVNKDGDKLKITKEENLKIFKLIKEQYSKPIYESTPYIAKSKEMPEDAFNNLSIKKQIDTLFNMIKILSRSNEDAKFDKSLNNGSSKCFLKVNTITDDKIYIVNESPSGLFKGKEELI

SEQ ID NO: 858 - protein, 1332 aa, synthetic construct
  REGION 1..1332: note = MG44-473 effector
SRRRLLRRKERMEILRSFFTKEICDIDPTFFERLDDSFYYKEDKKNKNTYNLFTSEYTDKDFYLEYPTIYHLRKAMQEEDKKFDIRMVYLAIAHIIKYRGNFLYPGEEFSTSEYTSIKQFFLDFNDILDELSNELEDNEDYSAEYFDKIENINDDFLEKLKVILMEIKGISNKKKELLDLFNVNKKSIYNELVIPFISGSAKVNISSLSVIKNSKYPKTEISLGSEELEGQVEEAISVAPEIKSVLEMIIKIKEISDFYFINKILSDSKTISESMVKMYDEHNEDLKKLKGFFKKYAEDQYNEIFKIRDEKLANYVAYVGFNKLRKNKVERFKHASREEFYGYLKQKLNNIKYAEAQEEIKYFIDKIDNNEFLLKQNSNQNGAFPMQLHLKELKTILNNQEKYYPFLSEGNDGYSIKEKIILTFKYKIPYYVGPLNKESKYSWVVREDEKIYPWNFDKVVKLDETAEKFILRMQNKCTYLKGDNDYCLPKNSLIFSEYSCLSYLNKLSINGKPIDPIMKSKIFNEVFLIKKQPTKKDIIEFIKTNYNADALTTTEKELPEATCNMASYIKMKEIFGKDFNDNKEMIENIIKDITIFEDKSILGNRLKELYKLNNDRIKQIKGLNYKGYSRLSKNLLVGLQIVDNQTGEIKGNVIEVMRKTNLNLQEILYLDGYRLIDAIDEYNRKNSLNDSYLCARDYIAENLVISPSFKRALIQTCSIIQEIERIFHKKIDEFYVEVTRTNKDKNKGKTTSSRYDKIKKIYSSCQELAMAYNFDMKRLKNELESNKDNLKSDILYFYFTQLGKCMYSLEDIDISDLTNNYHYDIDHIYPQSIIKDDSLSNRVLVDKKKNAAKTDKFLFEAKVLNPKAQQFYKKLLSLELISKEKYRRLTQKEISKDELEGFVNRQLVSTNQSVMGLIKLLKEYYKVDEKNIIYSKGENVSDFRHTFDLVKSRTANNFHHAHDAYLNVVVGGILNKYYTSRRFYQFSDIARIENEGESLNPSRIFTKRDILKANGKVIWDKKEDIKRIEKDLYHRFDITETIRTYNPNKMYSKVTILPKGEGESAVPFQTTTPRVDVEKYGGITSNKFSRYVIIEAHGKKGLDTILEAIPKTACGDNNKIEKDIDNYIASLDEYQKYTSYKVVNYNIKANVVIQEGSFKYIITGKSGNQYVLQNVQDRFFSKKAMITIKNIDKYLNNKKLGIIMAKDNEKIIVSPARGKNNEEIFLGKTELVNLLKEIKTMYSKDIYSFSAIQNIVNNIDCSIDYSIDDFIIICNNLLQILKTNERKNADLRLIHLLGNSGTLYLGKKLKSGMKFIWQSITGYYEEILYEVK

SEQ ID NO: 859 - protein, 1393 aa, synthetic construct
  REGION 1..1393: note = MG44-474 effector
MKNNEETLKKLRLGLDIGTNSVGYALLDENNKLIKKNGHTFWGVRMFDEAETAKDRGSYRKSRRRLLRRKERMEILRSFFTKEICDIDPTFFERLDDSFYYKEDKKNKNTYNLFTSEYTDKDFYLEYPTIYHLRKAMQEEDKKFDIRMVYLAIAHIIKYRGNFLYPGEEFSTSEYTSIKQFFLDFNDILDELSNELEDNEDYSAEYFDKIENINDDFLEKLKVILMEIKGISNKKKELLDLFNVNKKSIYNELVIPFISGSAKVNISSLSVIKNSKYPKTEISLGSEELEGQVEEAISVAPEIKSVLEMIIKIKEISDFYFINKILSDSKTISESMVKMYDEHNEDLKKLKGFFKKYAEDQYNEIFKIRDEKLANYVAYVGFNKLRKNKVERFKHASREEFYGYLKQKLNNIKYAEAQEEIKYFIDKIDNNEFLLKQNSNQNGAFPMQLHLKELKTILNNQEKYYPFLSEGNDGYSIKEKIILTFKYKIPYYVGPLNKESKYSWVVREDEKIYPWNFDKVVKLDETAEKFILRMQNKCTYLKGDNDYCLPKNSLIFSEYSCLSYLNKLSINGKPIDPIMKSKIFNEVFLIKKQPTKKDIIEFIKTNYNADALTTTEKELPEATCNMASYIKMKEIFGKDFNDNKEMIENIIKDITIFEDKSILGNRLKELYKLNNDRIKQIKGLNYKGYSRLSKNLLVGLQIVDNQTGEIKGNVIEVMRKTNLNLQEILYLDGYRLIDAIDEYNRKNSLNDSYLCARDYIAENLVISPSFKRALIQTCSIIQEIERIFHKKIDEFYVEVTRTNKDKNKGKTTSSRYDKIKKIYSSCQELAMAYNFDMKRLKNELESNKDNLKSDILYFYFTQLGKCMYSLEDIDISDLTNNYHYDIDHIYPQSIIKDDSLSNRVLVDKKKNAAKTDKFLFEAKVLNPKAQQFYKKLLSLELISKEKYRRLTQKEISKDELEGFVNRQLVSTNQSVMGLIKLLKEYYKVDEKNIIYSKGENVSDFRHTFDLVKSRTANNFHHAHDAYLNVVVGGILNKYYTSRRFYQFSDIARIENEGESLNPSRIFTKRDILKANGKVIWDKKEDIKRIEKDLYHRFDITETIRTYNPNKMYSKVTILPKGEGESAVPFQTTTPRVDVEKYGGITSNKFSRYVIIEAHGKKGLDTILEAIPKTACGDNNKIEKDIDNYIASLDEYQKYTSYKVVNYNIKANVVIQEGSFKYIITGKSGNQYVLQNVQDRFFSKKAMITIKNIDKYLNNKKLGIIMAKDNEKIIVSPARGKNNEEIFFEKTELVNLLKEIKTMYSKDIYSFSAIQNIVNNIDCSIDYSIDDFIIICNNLLQILKTNERKNADLRLIHLSGNSGTLYLGKKLKSGMKFIWQSITGYYEEILYEVK

SEQ ID NO: 860 - protein, 1385 aa, synthetic construct
  REGION 1..1385: note = MG44-475 effector
MNKYALGIDLGTNSIGWALVDEDNKLVEKKKFTLWGVRMFDESKSSKDRRVNRNARRRLKRRRDRINYLQEFFFEEINKIDKNFFQRLNDSFYKQEDKMFSNHYTFFDDEITDRDYFDRFPTIYHLRKYILEHNEKIDIRMLYLSLHHMIKYRGNFLYDGTFNKSDFRLVKNDFEIINTTLCEKAEEYEDDEDFFRGIDLSDELFEKLNQILSANKTKNDKKNELFKLFNPEKKSFVNELLIPLLVGGKVSVNNLSLIKEQKYEKAEISLDSDSLEANIEDAKEKIKELANIFDLILNIKEIYDFYFVCKLIGNCKYLSEAMVIKYDKHQDDLKELKKLVKEFLPKEYNTIFKKVDSKTNNYPKYIGMNHSKKRERFGHCSQEDFYAFIKSSVLNKITEPEAQEVINKIKRDIEDENYLPRQNSGHNTSIPMQLNLIELKEILEKQSKYYDFLNQNDGKYTVKDKIEKIFKYRIPYYVGPLAYYNGSEDLGTNRAWYKRNENMENVKITPWNFEEVVNTDESAKEFIQRMQNKCSYLHGADDYCLPKKSLLYSEYNCMQYLNKLVVNGAPITKDVKMNIFENVFLKKKKPSKKDIYDLLESNYGFKKDSLYSKIEDIPCDMSSYIKFKEIFGDEFEENKEKIEEIIKDITIFEDKKILEKRLKDVYELTDDKIKSIKDLNYKGYGRLCKRLLNGLSTTNNKTGETGLTIIDILRDTNLNLMEILASQEYNFQAQIDEYNKNLLKENKESVEDFINDNLFVSADGTRALNQCYKLIEEIERIIGEPIDSYYIECTRTNKDKKVVKASRKNATLDLLKQAKSDAIELEKFGIDINKLTKDLEASDNDLRGEKLFLYYRQLGRCMYSFEKIDVSKLDNYDIDHIYPQSLIKDDSFSNKVLVNKIYNQHIKKDKFLFEIRDNLDSRVFGFYKLLLDKKLITKEKYRRLTETEISSEKLNGFVNRQLVSTNQAVKGLITLLKEYKGIDPSKIIYSKSENVSDFRKDYDIEKSRDANNFHHAHDAYLNVVIGRTIDRYYKHNHLYYFDNYQEMKNDKKTINPQTILKNDRVYNTKNGLITIWEKEKTLKLLNHYIKETYSISETWRTSRGTEMYGKMTVRPASDTRVPVSLTDPRIDVQKYGGIESNAYSHYCIVRTIDKKNKVDYYLEAIPYRSRNNQNEYISNLYSLNKSVKEYKIVCNEIKTKVLVRYGKLAYYITGKTGDSYLIMNAIDRFMTYDAIKTLKSIAKYKENIKYSNPMVIEKNRIIIAKNKDNEITRQITVEECDNLLKQIITVYSKEIYGYSNVSSIVERYKKNTKELSLTDKIELVYQLIQLLKTNARCIIDLSIINGSKNSGLMVITRHLKPGMKFISTSITGYYEKLLFEVPDGI

SEQ ID NO: 861 - protein, 1425 aa, synthetic construct; identical to SEQ ID NO: 143
  REGION 1..1425: note = MG44-476 effector

SEQ ID NO: 862 - protein, 1372 aa, synthetic construct
  REGION 1..1372: note = MG44-477 effector
MKKDFYIGLDLGTDSLGWAATDTDYNFLRLKGKTAWGSRIFEGAKSKKERRVYRSSRRRKERQKYRIQLLNSLFAEEINKVDKTFFLRLENANLHMEDKDKSIDSKYLFKSVEEEKLFYDKYPTIWHLRRDLINGDSFALSDLRYVYLAIHHIIKYRGNFLKEGETNYNNVTEEVIERINNCLSLLAENIEDESSSLSKAKLTELKNILLDKNLNKTAKQKKIIELFDVVSCKEYITMFATIVTGGNYKLSKIDKALEESINFTENFEEMEDQIAHDLGDAFELVKCAKELYDFASLKELMGNEKYISFVMANIYEEHKEDLATLKKFIKAFDKSKSLSGKDSLYDLIFINEGNNNYDALKKVITEIDESNGLSGKDSLHDLLFKKEEKNNYAALVGVNSKNKKIKLEDFNKVIEKILENNKEIIEPSNYKKLDEKVKARQLLRTIAHNSTSLIPHQVHLIELKEILKNAEKKYSFIKNISEKIITLFKFRVPYYYGPLDSRSEFAWVERKSNEKITPWNISEIVDDNATKEKFIKRLTNNCTYLLGEKVLPKVSLIFEEFMIRDRLNTMILNGALLTNETKSLIYEYIISRNKTTVSQIKSFLKNKTATKENDITISGIKEDVPFEATSHATLEKLFDLKHDFDKVEHLIFLATIYADDKKAFKTLLTNSKDLSKEQIKAILNLPTKKWAPLSKKLLCGISFVDDNGIAMSILDVMRETNQNFQMVYNNKDYGFKDLVDMHNNEITGNLSTNQKIAMILEDTPTITKRSINQALLVLDDIVKASGNNPKKIFIETTRENDAKSKGKEKDKRYVELKRLISKDIEIISKENKKELLNELELNQANVKGRHLYLYFKQMGLDMYTGEKINIGDVFDSTKYDLDHIVPQSLIKDDSLDNLVLVNRLANQRIKGSQYPLPRELKTDKVIKTWQYLHKIGAISDKKYNSLMRTSEITLEEIEVFVNRQINVVDYANITLRNVLKIKYPDTQLIFSKAQYPALLRQELNIAKNRDINDAHHAVDAYLNVVAGNELTMKFSNVRRIYAERSNKEDKDSRSFNMDGCLKNFVKKLDKNGVTYAEKIKKNALRHDALVTFKVDYQNGALYNATIYRKANDSNLIPIHTNGPLADVSKYGGYSDLSQAYIVAIEYNIGKKRFKSLSRVPLLYIKLYGDNNETLWKKVIGNDMASDIKIIKRIHLNQKIKYNNCIYLLYTSGENRNNYKLAYQSYLDNELLDYVNKSLSNAKKIIDCKEMAFSMKTNKNDGCFEVSKTKNMKVFIALKEIYAQSIFESCSFIVRARNMMRDTFANLTLYEQLMTIQNMIILLSRKSVNAKFNSAFADMKTNLMKPSKNLKTGQNITLIYESPSGLYKHEEKI

SEQ ID NO: 863 - protein, 1341 aa, synthetic construct
  REGION 1..1341: note = MG44-478 effector
MKKYYIGLDIGTDSTGWAATDESYNFLRLKGKTAFGSRLYPKANDCKERRTFRSNRRRMQRRKYRIHLLNDLFAEELNKIDKNFLIRLENSTFNFEDKKDKTSVRTLLFKTFEEEKNYFKNYPTIFHLRKKLLEDDSTSFNDLRNLYLAIHHIIKYRGNFLKEGKLDYSDFNNELLIRLNEILKTIYLEENEEDFDGDFINSNDKENFKTILLNKNLNKTTKKKELKKLFNVSSELCLAYIDLFVSLITGSSYSLKNLKLESDNKISFEENFDEKVLEFEQLLQDKFEIVQIAKEIYDYVSLNDLLKDEKCLSNVMVNVYDEHKKDLALLKKVIINIDKQKNNDHNLYNEIFKNTNNKNNYSSLVKVNTITDKKTSINDFNKELLKIIKENKDFICEEDYNYLVNKLENNELLKTIANVSTSVIPHQLHLNELEIILNNAIKYYPFIATIKDKIIAIFKFRVPYYYGPLDDRSNFSNVVRFNNNQVYPWNINEVIDDNQTRQKFMRRLTNNCRYLFDCKVMPKSSLLYEKFLILDRLNAMEVNGSLLSYKEKEEVFRYIISRNKTTISNLKSYLKKIYNLNDDITINKISLEVPFEAPSHALLNQFFDLETENEKVENLIFLATVYADDKNILKTILEKDISLDKKQINAILSLSTKKWAPFSKELLSGIYYIDDLGVASSIIDIMEKETKNFQVVLNDSKYNFQTIIHDFNKEKRGELTNKEVIDDLLANTPAMFRRSINQTLLILDDIVSITHQDPEKIFIEVTREDLKEDKKKQYDKRQDELKKFLTSLKNDVDSLMKSQSKKLLEELNDENIINKLKIKSKHVYLYFKQMGIDVYTGKIIDLSDVLNSNKYDTDHIIPQSKIKDDSLDNLVLVERTYNQRIKSDAYPIPEEIKTPEILKLWKYLFKIKAISEKKYNNLIRNKELTLQEMEDFVARQINVVNYSNVVLRDVLNIKYPNTKIVFSKAQYASYLRKELKIAKNRNLNDTHHAVDSYLNIVAGNILSTTFSNVRTRYIERNIEEKTFNMERVLNYNLKKNDLANIVKNNCLRHDALVTLKLEYNNSNLYKQTIYKANSSDSLIPIHTNNCMKNTDKYGGYLKFTTHSLAVISYKIKGKEIKKIEALKLMNLKMYKNNFDELIKSLVTEKDATDIKLIKFIGLNQKIQANGGIYYLYSSNEDKNKYKMAYQNYIDNDLLLYFNFAFKKIDQLSEDNTILQQEIITNKYEEHNFIITKEKNKMIFDSLINNSFNKVYDSCNYIVKLRNLKDDNSFNDFSLKKQIEVINQLIIYMSRNSDSSNLKNYFSNLSNARMLLSKNITKNNIYLIHESPTGLYKYKKLL

SEQ ID NO: 864 - protein, 1398 aa, synthetic construct
  REGION 1..1398: note = MG44-479 effector
MENKYYVGIDLGTSSVGWAATDENYNFLRLKGKTAWGARLFDGANTCQKRRERRSKRRRMARRKYRLLLLNQLFAEEMAKVDKTFFLRLANSTYWAEDKAKDDKGNDLGKNIIFKTWKEESEFYNNYKTIWHLRNELVKNNDNAFSDLRLVYLAIHHIIKYRGNFLTEGDNFNEKPTVELIRELNSILSKLDEENSNDFLLDDEESIIEDENNKYISEDKLDKLLEILKSDEYKSKKEKQNDIDKLFVKNRSQLIKKYIDMYKVLVTGGSFKISRIDKELGDLEIDFNNGFDENLDEIKSKLGNAIDLVFNAKKIHDYNSLSKLFGDKNANKNLSQIMVDVYDNHKKDLRNLKKVIRSVDVKLDKKGKESLYYSIFRPIKLTKEDNKRDENNKKTKKSQTPNYASFVQGDDINFKYVTLEKLNDNLKEVLEKNKQYIDDEETYIDLHDKAEKGILLQKPANVSTSLIPHQSHLQELKIILKNASDRYPFIKEIEDKIIKLFMFKVPYYYGPLSTSKSHPYAWVETKEDGTKITPWNMYDVVDEEKTRNKFMKRLINSCSYLVGEPVLPKVSLCYEEYLVLDSLNKMMLNGQFLSPSVKESVLKYILSRSKTTIGNIKTFLKKENELYQNELKDDDISISNIKSDIIFNASSHALLSKYFDLEKDKEMVESLILLATIYAGDSKSLIEAINSNKNYKELTKEQVNAISKLPTNKWGRLSKTFLCGGKDGEMYWVDESIGRCCSILEIMQETNKNLQEVLFDKTYKFQDKINKFNADLRGNKTVKDQIDDIYDEMPSVFVRSVTQTIAVLDDVVRAARCAPNKIYIEVTRADQEKKETKSRYDALKEVIKKELKDEADRRDSLLEKLEYANNSRKLRSINVYLYFLQLGIDFYTGEPIKDLNDVINGIYDKDHIVPQSLRPDDSIDNLVLVNKDYNEKVKRDIYPIVAPIRNEKTLKLWKSYHKRKLISDKKYNSLIRTTELTYEEINDFVNSQINVVNFSNVQLKRILELKYPDTKVCFTKAIYASSLRQKLSIAKMRDLNDSHHAVDAYLNIVGGDILSNLYTDVFYLYDEKKNKKKNVSFDMEKRLHNYIEDNNLKDKIRTNCFRHDALITYKPKFSTSKKAGDLYKETIFKKADKDSVNLIPCHTKGPMKDTKKYGGYSQINQSYILAVEYTSGKKTVKKLLRVPTMYLNLYGNNEEELLKLIVNDEKAKDIKILRKIYINQKIKYNGCYYRIFTKGKNNIYKMAYQNYIDNNIVLYLNKSLKLSDDLIDKTIDSQTFIINNKGEKFIISKEKNKIIFDTIKERMFNKRYDECSYFEKAREMKFEIFNNLSLKEQISTLINMLKLLSCSTESVNINAEFKVEKRLLFVNSPDITKEEIYIVNESPSGLFKGKEELI

SEQ ID NO: 865 - protein, 1386 aa, synthetic construct
  REGION 1..1386: note = MG44-480 effector
MAKQKILCGLDIGTNSVGWCVTDENNKVIKKQGKSLWGVRMFEEAKDAKERRGFRSSRRRLKRRKERLSLLQSLFSIPMNEVDASFFYRLSNSFYHNEDREHPFQYTLFNSVNYTDKQYYDEFPTIYHLRKHLLESKEKEDLRFIYLALHHMIKYRGNFLSEGTSFKPLDKESADSDFRALQTLIKEESRFDGENISYNDTIFEELKIANKNIKRLGDLQDRFNELLNPLKNGFIKSNIIPLMLGKKIKIKNLKLEDSEEKLELKEICPADENYEDNVQLILASYPEEENLVEMLLLLQKIYQFFLLGKLLGEHQYLCNAMVERYEKHHSDLKQLKAYIRKYHNEDYGRLFRKPRKKGEKEEANYSSYIGSYIVNGEEPCRFGRGGKQEEFFKLLKSILGQDDNQEAKDIIQSIDNKDYLPLLNSTSNGIFPYQLNLLEMRVILENQSKYYEFLNERDEDGTIADKIISLLTFKIPYYVGPLSSKASHSWIVRKEGKIYPWNFYRMVKKDDTAAEFIKRMLNRCSYLPSEYCLPKDSLIFTYYNVLSFLNKLQVNGDYLDYEEKMELISLFKTKRKVNVKEIENFFKHKNPGTEVSITTSNGKGLSNIACNMSSYYDFANIYSPEYVDSHTDEIEAIIQDIVIFEDKQILEERLKNTHGIKDISIIKKIKGLNYTKYGRLSKELLVGLKAANQETGELYGSILHIMEHSNMNLQEIIHAEEFNFQALIDDYNQAHSSSDKKDTIEGYVDTLYVNPGMRRGLIQAYKIIEELEKILKRPIDEFYVECSRQNKTKKGPTSSRKQQLIKLYKDAISATKDALEFKKLLNRLEEVDENQFQSDKFYLYFLQMGRCMYSGDPIELDSLFDTSKYDIDHIIPQSLIKDDSFNNRVLVKQELNREKTAVYPIQSSLLFHGDKSKAFAFYRYLKDMKLMPEDKFARLTRTQPLKDEEYAAFANRQLVYTNQAVAGLIGAIQYFKRDSGHMPRIIYSKAENVSDFRKVFELVKSRTANNFHHAHDAYLNIVVGRTLDSYFSPFKQNKDTIHQMHLEKKTTNPLKVFTSNYKVFDLSSNLVWDKENSLKEIRHQLYECYDILTTTRTYQGTTLFEKVTIYKKGEGNIGVKASGPLANASEYGGLTGYAFGFYTLIKIDRIYILEAIPTLFKNDIKEYLNTLYKEDYEIIVPILNINSVIMEGKKKYCITGKTGNQYLIKNLLERRFTYRELTIIHKLDKIQERLTKNKTSLKGTETEEDLKKLGLYLKENYLIVSIAKNKDAKQIELSYDECSELYDSINNILNKEIYAYSASSTISTLLNEQRDYFEKSSIALKIKVLLNLLNFLKCNERKSVDLTLLAGKSTMGILYLGKKLKPSKIIAESITGFYAKVIWEIK

SEQ ID NO: 866 - protein, 1378 aa, synthetic construct
  REGION 1..1378: note = MG44-481 effector
MEKKYYIGLDLGTSSVGWAATDENYNFLRLKGKTAWGARIFSEAVDCKERRSFRSNKRRVARRKYRLLLLKNLFAEEMAKVDKTFFLRLENSTYWAEDKAKDDEGNDLGKTLIFKTTEEEREFHKAYPTTWHLRKKLVDNDEQALSDLRLVYLAIHHIIKYRGNFLSDGTKDNEEPSKDTIDRINVILNLLEAKDNESGISDNITYLSKESYSELIETLEDKNLNKTKKQDKIKKLFKNVDKTNEDIKVYIDLFKTLVTGGVFSVKKINEEYDKLKIDFNNGFEDTADEISKALGDAYELVLIAKAYNDYISLKDLLDGNPYLSYVMADIYDEHKKDLKSLKKILVSIDYKLGNEGSNRVYNLVFKPVIVPKEERKDKDGKKNKKLTTPNYASFIQGDDVEKKSVTLENLNKNIKEILEANKQYVDEIDKEEFDRLLDKASNNELFKKQATVSTSSIPHQCHLKELNKILENAGEKYPFIKENSDKIIQLFKFRVPYYYGPLNNESKEHAWIVKNEGKERTKITPWNIDEVVDKGRTREGFFKKLTNSCTYLVGETVLPKVSLVYEKYLALERLNKMQVNGNYLNHSDKMDLLNYVLGNSNTTIENIRKKLASDTGMKINDIVISNIKNNVPFTATSHAFFRKHFNLENSEEFELCEEVIKYATIYADDKKELKKFLSENFSFDEKLIKEIANLQTNKWGRLSKKFLCGGAKDEMYYTDENGVMYTILDLLEETNQNLQEIVNSGKYGFDEKIKEFNDALTKDETIDEQISKILEGTPALMVRSITQTIKVVDDVIKAAKCEPKKIIMEVTRIDEKKGQEVASRYIQLKKKISEDKGIDDKEREELLSDLEEANKTKKLKGKHLYLYFSQLGIDLYTGKKMKIEEVLEGKYDIDHIVPQSLIKDDSLDNQVLVNKKYNQDVKKDIYPICDEIRSKMLNLWYNYKERGIIKEEKYNRLIRTTDLTDDEINDFVKRQINVVNYSNVQIKRIFELKYPDTEIIFSKAGFPSLLRKEYEIAKMRDLNDAHHAVDAYLNIVCGDILTSLYTDVFYLIKRKKEKKENPTFNMERRLLGYIKKNDLMNKIKSNCLRHDALITFKPDYDSGMFYKQTIFKKSGDKETGLIPLHTKGPMSDVKKYGGYSSLSQSYLLAVEYKVKKKTIKKLLRVPTMYVKLYGDDLNTIAKLMIDDEKAINIKILRKICLNQKVRFNNCYYLIYTSDDTRCKLKMAYQNYIDNDALVYLNKCLKKIDELDDKDKTEQEIIVNKDGDKLKITKEENLKIFKLIKEQYSKSIYNSITYIVKSRDILEDSFNNLSIKKQIDTLFNMIKILSRSNEDAKFDESLKNGGIKYYRISMNIDNNQIYIVNESPSGLFKGKEELI

SEQ ID NO: 867 - protein, 1398 aa, synthetic construct
  REGION 1..1398: note = MG44-482 effector
MEKKYYIGLDLGTSSVGWAATDENYNFLRLKGKTAWGARLFDGANTCQKRRERRSKRRRMARRKYRLLLLNQLFAEEMAKVDKTFFLRLANSTYWAEDKAKDDKGNDLGKNIIFKTWKEESEFYNNYKTIWHLRNELVKNNDNAFSDLRLVYLAIHHIIKYRGNFLTEGDNFNEKPTVELIRELNSILSKLDEENSNDFLLDDEESIIEDENNKYISEDKLDKLLEILKSDEYKSKKDKQNDIDKLFVKNRSQLIKKYIDMYKVLVTGGSFKISRIDKELGDLEIDFNNGFDENLDEIKSNLGNAIDLVFNAKKIHDYNSLSKLFGDKNANKNLSQIMVDVYDNHKKDLRNLKKVIRSVDVKLDKKGKESLYYSIFRPIKLTKEDNKRDENNKKTKKSQTPNYASFVQGDDINFKYVTLEKLNDNLKEVLEKNKQYIDDEETYIDLHDKAEKGILLQKPANVSTSLIPHQSHLQELKIILKNASDRYPFIKEIEDKIIKLFMFKVPYYYGPLSTSKSHPYAWVETKEEGTKITPWNMYDVVDEEKTRNKFMKRLINSCSYLDGEPVLPKVSLCYEEYLVLDSLNKMMLNGQFLSPSVKESVLKYISSRSKTTIGNIKTFLKKENELYQNELKDDDISISNIKSDIIFNASSHALLSKYFDLEKDKEMVESLILLATIYAGDSKSLIEAINSNKNYKELTKEQVNAISKLPTNKWGRLSKTFLCGGKDGEMYWVDESIGRCCSILEIMQETNKNLQEVLFDKTYRFQDKINKFNADLRGNKTVKDQIDDIYDEMPSVFVRSVTQTIAVLDDVVRAAKCAPNKIYIEVTRADQEKKETKSRYDALKEVIKKELKDEADRRDSLLEKLEYANNSRKLRSINVYLYFLQLGIDFYTGEPIKDLNDVINGIYDKDHIVPQSLRPDDSIDNLVLVNKDYNEKVKRDIYPIVAPIRNEKTLKLWKSYHKRKLISDKKYNSLIRTTELTYEEINDFVNSQINVVNFSNVQLKRILELKYPDTKVCFTKAIYASSLRQKLSIAKMRDLNDSHHAVDAYLNIVGGDILSNLYTDVFYLYDEKKNKKKNVSFDMEKRLHNYIEDNNLKDKIRTNCFRHDALITYKPKFSTSKKAGDLYKETIFEKADKDSVNLIPCHTKGPMKDTKKYGGYSQINQSYILAVEYTSGKKTVKKLLRVPTMYLNLYGNNEEELLKLIVNDEKAKDIKILRKIYINQKIKYNGCYYRIFTKGKNNIYKMAYQNYIDNNIVLYLNKSLKLSDDLIDKTIDSQTFIINNKGEKFIISKEKNKIIFDTIKERMFNKRYDECSYFEKAREMKFEIFNNLSLKEQISTLINMLKLLSCSTESVNINAEFKVEKRLLFVNSPDITKEEIYIVNESPSGLFKGKEELI

SEQ ID NO: 868 - protein, 1336 aa, synthetic construct
  REGION 1..1336: note = MG44-483 effector
MNNNYYIGLDLGTDSLGWATTNEDYDFLRLKGKTAWGARIFSSANDCKQRRTFRSSRRRMQRRKYRIFLLNQLLCEDISKVDSTFFARLQNSHMVWDDKKKLNLSRNLIFKDKNEEKSFYKKYPTIWHLRNALINKDINALSDIRYVYLALHHIIKYRGNFLKEGKLNIQEFNFSLFSDLNDIIKEYIEEKNEIDVDFDIISKDSYQKIIEIIENDNANKTEKKKELKELFNSSYSKEVIDCFITLSVGGEYDISKLSGEDSLKVSFEKNYDEIEASIQSSLQNYFKIVQIAKQLYDYNLLKKLIGNSKSISEVMVNVYETHKEDLTLLKKVIINIDKQNGNRKLYEEVFKDKNNNKNYASLVHNNTETNRVSLSDFNTYIGKILDSNKDKIEQNDYNYLKNKVEKKELLQIIANVSTSIIPHQLHYLELETILDNASELYPSIKENKDKFIKLFLFRVPYYFGPLDSRSKNSNVVRKENTTVTPWNIDTIIDYSQTKEKFMKKLTNNCSYLYACSVLPSASLIIEDYQIYNRLNVLTINGALINNELKENLYKYIIGRNKTTVNSLKTYLKNKEGFKGEILFDKIKEDVPFEASSHAILGKAFDLGKNLNLLERCILLATIYIDDKKAFIDEVNLEFPSLTKEQLNCIKNIVPKKWSRLSKELLTELYYVDDNGIAYSILTLLKDTNKNLQMILFDKQYNFMDLIKEKNDEMSGNKSTSDVINEMLEQVPAITRRCINQTMLVVDDIIKAAKKEPSKIMMEVTRNESNDKKEKNSRYKELENFLNSIIKDSKNSDSEYKNQAAKLENELHDEHLVDNLKLKGKHLFLYFKQLGIDMYTGEIINIHDVLNSNKYDTDHIIPQSLIKDDSLDNLVLVSRTINQNIKKDYYPIPQEIKTDKVKSLWTYLFKKKLISEKKYNNLTRTKEISLDEIEQFVNRQINVIDYANITIKNIMEKKYPNTQIIFSKSHYPSFLRKELKIVKNRDVNDVHHAVDAYLNVVCGNILSTKFSNIRKIYELKNNPNREKSTTFNMEKVLLFELENTKLFDKIKANCFRHDALVTFKTDYNNGALYKQTMFKASNDESLIPIHTNNEFNDTTKYGGYSSLASSKMTLVTYSKKGKQYKCIITRKSLFDKQKIDESKYLKKMLDDGDNPQIICDICLNQKIIYDGGIYLLYTSNEKQNKLKMAYQNYIDNNILYYLDKANKLSADSLKDDTITYNYLNKNGEVILQISKDMNQKIFNTLIETANKPVYDSCNYIKRIRDLSNFETFNIKSQIEILNNIILTLSRNSEKSKLDNYYKKVGNAKLLITKDVTKNNITLLYESPTGLFVTKRKI

SEQ ID NO: 869 - protein, 1720 aa, synthetic construct
  REGION 1..1720: note = MG44-484 effector
MEKKYYIGLDLGTSSVGWAATDENYNFLRLKGKTAWGARIFSEAVDCKGRRSFRSSKRRVARRKYRLLLLKNLFAEEMAKVDKTFFLRLENSTYWAEDKAKDDEGNDLGKTLIFKTTEEEREFHKTYPTTWHLRKKLVDNDEQALSDLRLVYLAIHHIMKYRGNFLSDGTKDNEEPSKDTIDRINVILNLLEAKDNESGVSDNITYLSKESYNELIETLEDKNLNKTKKQDKIKKLFKNVDKTNEDIKVYIDLFKTLVTGGVFSVKKINEEYDKLKIDFNNGFDDNADEISKALGDAYELVLIAKAYNDYISLKDLLGGNPYLSYVMADIYDEHKKDLKSLKKILVSIDYNLGNEGNNRIYNLVFKPVIVPKEERKDKDGKKNKKLTTPNYASFIQGDDVEKKSVTLENLNKNIKEILEANKQYVDEIDKEEFDRLLDKASNNELFKKQATVSTSLIPHQCHLKELKIILENAGKKYQFIKENSDKIIQLFKFRVPYYYGPLNNESKEHAWIVKNEGKERTKITPWNIDEVVDKGRTREGFFKKLTNSCTYLVGETVLPKVSLVYEKYLALERLNKMQVNGNYLNHKDKIDLLNYVLGNSNTTIENIRKKLASDTGMKINDIVISNIKNNVPFTATSHAFFRKHFNLENSEEFELCEEVIKYATIYADDKKELKKFLSENFSFDEKLIKEIANLQTNKWGRLSKKFLCGGAKDEMYYTDENGVMYTILGLLEETNQNLQEIVNSGKYGFDEKIKEFNDALTKDETIDEQISKILEGTPALMVRSITQTMKVVDDVIKAAKCEPKKIIMEVTRTDEKKGQEVASRYIQLKKKISEDKGIDDKEREELLSDLEEANKTKKLKMEKKYYIGLDLGTSSVGWAATDENYNFLRLKGKTAWGARIFSEAVDCKGRRSFRSSKRRVARRKYRLLLLKNLFAEEMAKVDKTFFLRLENSTYWAEDKAKDDEGNDLGKTLIFKTTEEEREFHKTYPTTWHLRKKLVDNDEQALSDLRLVYLAIHHIMKYRGNFLSDGTKDNEEPSKDTIDRINVILNLLEAKDNESGVSDNITYLSKESYNELIETLEDKNLNKTKKQDKIKKLFKNVDKTNEDIKVYIDLFKTLVTGGVFSVKKINEEYDKLKIDFNNGFDDNADEISKALGDAYELVLIAKAYNDYISLKDLLGGNPYLSYVMADIYDEHKKDLKSLKKILVSIDYNLGNEGNNRIYNLVFKPVIVPKEERKDKDGKKNKKLTTPNYASFIQGDDVEKKSVTLENLNKNIKEILEANKQYVDEIDKEEFDRLLDKASNNELFKKQATVSTSLIPHQCHLKELKIILENAGKKYQFIKENSDKIIQLFKFRVPYYYGPLNNESKEHAWIVKNEGKERTKITPWNIDEVVDKGRTREGFFKKLTNSCTYLVGETVLPKVSLVYEKYLALERLNKMQVNGNYLNHKDKIDLLNYVLGNSNTTIENIRKKLASDTGMKINDIVISNIKNNVPFTATSHAFFRKHFNLENSEEFELCEEVIKYATIYADDKKELKKFLSENFSFDEKLIKEIANLQTNKWGRLSKKFLCGGAKDEMYYTDENGVMYTILGLLEETNQNLQEIVNSGKYGFDEKIKEFNDALTKDETIDEQISKILEGTPALMVRSITQTMKVVDDVIKAAKCEPKKIIMEVTRTDEKKGQEVASRYIQLKKKISEDKGIDDKEREELLSDLEEANKTKKLK

SEQ ID NO: 870 - protein, 1378 aa, synthetic construct
  REGION 1..1378: note = MG44-485 effector
MEKKYYIGLDLGTSSVGWAATDENYNFLRLKGKTAWGARIFSEAVDCKGRRSFRSSKRRVARRKYRLLLLKNLFAEEMAKVDKTFFLRLENSTYWAEDKAKDAEGNDLGKTLIFKTTEEEREFHKTYPTTWHLRKKLVDNDEQALSDLRLVYLAIHHIMKYRGNFLSDGTKDNEEPSKDTIDRINVILNLLEAKDNESGISDNITYLSKESYSEVIETLEDKNLNKTKKQDKIKKLFKNVDKTNEDIKVYIDLFKTLVTGGVFSVKKINEEYDKLKIDFNNGFDDNADEISKALGDAYELVLIAKAYNDYISLKDLLGGNPYLSYVMADIYDEHKKDLRSLKEILISIDNKLGNEGNNRIYNLVFKPVIVPKEERKDKDGKKNKKLTTPNYASFIQGDDVEKKSVTLENLNKNIKEILEANKQYVDEIDKEEFDRLLDKASNNELFKKQATVSTSLIPHQCHLKELKRILENAGEKYPFIKENSDKIIQLFKFRVPYYYGPLNNESKEHAWIVKNEGKERTKITPWNIDEVVDKGRTREGFFKKLTNSCTYLVGETVLPKVSLVYEKYLALERLNKMQVNGNYLNHKDKIDLLNYVLGNSNTTIENIRKKLASDTGMKINDIVISNIKNNVPFTATSHAFFRKHFNLENSEEFELCEEVIKYATIYADDKKELKKFLSENFSFDEKLIKEIANLQTNKWGRLSKKFLCGGAKDEMYYTDENGVMYTILDLLEETNQNLQEIVNSGKYGFDEKIKEFNDALTKDETIDEQISKILEGTPALMVRSITQTMKVVDDVIKAAKCEPKKIIMEVTRTDEKKGQEVASRYIQLKKKISEDKGIDDKEREELLSDLEEANKTKKLKGKHLYLYFSQLGIDLYTGKKMKIEEVLEGKYDIDHIVPQSLIKDDSLDNQVLVNKKYNQDVKKDIYPICDEIRSKMLNLWYNYKERGIIKEEKYNRLIRTTDLTDDEINDFVRRQINVVNYSNIQIKRIFELKYPDTEIIFSKAGFPSLLRKEYEIAKMRDLNDAHHAVDAYLNIVCGDILTSLYTDVFYLIKRKKEKKENPTFNMERRLLGYIKKNDLMNKIKSNCLRHDALITFKPDYDSGMFYKQTIFKKSGDKETGLIPLHTKGPMSDVKKYGGYSSLSQSYLLAVEYKVKKKTIKKLLRVPTMYVKLYGDDLNTIAKLMIDDEMATDIKVLRKIYLNQKIKYNGCYYLIYTNNEFVNKYKMAYQNYIDNDALVYLNKCLKKTDELDDKDKTEQEIIVNKDGDKLKITKEENLKIFKLIKEQYSKSIYNSITYIVKSRDILEDSFNNLSIKKQIDTLFNMIKILSRSNEDAKFDESLKNGGIKYYRISMNIDNNQIYIVNESPSGLFKGKEELI

SEQ ID NO: 871 - protein, 1347 aa, synthetic construct; identical to SEQ ID NO: 166
  REGION 1..1347: note = MG44-486 effector

SEQ ID NO: 872 - protein, 1457 aa, synthetic construct; identical to SEQ ID NO: 60
  REGION 1..1457: note = MG44-487 effector

SEQ ID NO: 873 - protein, 779 aa, synthetic construct
  REGION 1..779: note = MG44-488 effector
MASYYDFSKIFGEEYIKNNIDKIENIILDIVIFEDKEILESRLRNEYSLSNEQVKKIKGLSYSKYSNISKTLLTNIKYFDENGELKKSIIKIMEETNQNLQEIIFNEKYNFQNEIDKYNKEHLPSDKITKIEDYVKELGTVSPIMKRPLIQAFKICEELEKIIGQPINEYYVECTRTNEKIKQRKNSRLENLKKLYQEAEQTLKNDPSYINALKELKNCDENKFQSDKYFLYFSQLGKCAYSGEPIDISELFNTDKYDIDHIIPQSIIKDDSLENRVLVKQELNRRKGDNFPIPQNILFKGNRIVANNFYKLLYDAKLIGSKKYQNLMRTSELSNEELSSFVNRQLVSTNQAVKGLINAIKYFKETETFKPKIIFSKANIVSDFRKEFDIVKSRNVNNFHHAHDAYLNIIVGRTVDTYFAPFLQNEYTLSLMHSKNLTTNPINIFKNKNNIKNNIYDKKGNLVWDYNNSLAQINKNIFNRFDILTTTRTYYGTKLLNKVTIYKKGEGNIPVKTTNCLNDVSKYGGFTGYAFGSYCLIKTNNSYVLEAIPTMFRKNINDYLTKVLNYTNFEIIIEKLNINTVFESNNKKFAITGKTGNRYTLLNFNERLFNKNNIKIIKKIEKVISKLTEKRILINGKENIEDIKQIFILKNDDEIIVSPSSNDKVKEITLNSNELLNLYHYFIELFNKPIYSFSASKSISLELQNNENKFNELSIFRKIKVLFNLCDFLKCNERKAIDLTLLDLSKNCGILLINKKLSNCQIIYESITGFYRKVVYKID

SEQ ID NO: 874 - protein, 575 aa, synthetic construct
  REGION 1..575: note = MG44-489 effector
MYKKILCGLDIGTNSVGWCLTDENNNIIKKSGKSLWGVRMFDEAKTCAERRSYRCDRRRLTRRKERIDLLQELFKNEINKIDPSFFYRLDNSFCVKEDKKVHFEYTLFNDKNFTDKNYFKKYPTIYHLRKDLIKSNQKEDIRLIYLALHHMIKYRGNFLNGTNDFKPLNINDADKYFKKLKDNLCQINDEDLSYDIYYDNNIFNQLKNLNQKESRISILKEKYCELLIKDDTNKYLKNVIIPLMVGGKISLKKCLPNINDDCEIKDICVKDEKFNDNIAFLLATYPELDSYINSFIECKNIYDFFLLGKLLGDSKYLSFAMVNKYTLHQTQLKELKKFIKSNYPNKYNSIFRDLNKNNYVKYVGSNITSNKKDNISHITSEEFYSFLKKELCLEKYKITEENSNDYLSKILIEMENNNYLPRLNSTDNGVFPYQLNKMEMEIILNNQSKFYPFLLENDEYGSVKDKIISLLEFKIPYYIGPLTMPSKVNTSKYSWVVRSEEKIYPWNFDKVVNKNESAKVFIQRMLTKCTYLPSEYCLPKDSIIFSYFNVLQVLNKTLINGSTIDEQTKEKIIHE

SEQ ID NO: 875 - protein, 1334 aa, synthetic construct; identical to SEQ ID NO: 85
  REGION 1..1334: note = MG44-490 effector

SEQ ID NO: 876 - protein, 1398 aa, synthetic construct
  REGION 1..1398: note = MG44-491 effector
MENKYYVGIDLGTSSVGWAATDENYNFLRLKGKTAWGARLFDGANTCQKRRERRSKRRRMARRKYRLLLLNQLFAEEMAKVDKTFFLRLANSTYWAEDKAKDDKGNDLGKNIIFKTWKEESEFYNNYKTIWHLRNELVKNNDNAFSDLRLVYLAIHHIIKYRGNFLTEGDNFNEKPTVELIRELNSILSKLDEENSNDFLLDDEESIIEDENNKYISEDKLDKLLEILKSDEYKSKKEKQNDIDKLFVKNRSQLIKKYIDMYKVLVTGGSFKISRIDKELGDLEIDFNNGFDENLDEIKSKLGNAIDLVFNAKKIHDYNSLSKLFGDKNANKNLSQIMVDVYDNHKKDLRNLKKVIRSIDVKLDKKGKESLYYSIFRPIKLTKEDNKRDENNKKTKKSQTPNYASFVQGDDINFKYVTLEKLNDNLKEVLEKNKQYIDDEETYIDLHDKAEKGILLQKPANVSTSLIPHQSHLQELKIILKNASDRYPFIKEIEDKIIKLFMFKVPYYYGPLSTSKSHPYAWVETKEEGTKITPWNMYDVVDEEKTRNKFMKRLINSCSYLDGEPVLPKVSLCYEEYLVLDSLNKMMLNGQFLSPSVKESVLKYILSRSKTTIGNIKTFLKKENELYQNELKDDDISISNIKSDIIFNASSHALLSKYFDLEKDKEMVESLILLATIYAGDSKSLIEAINSNKNYKELTKEQVNAISKLPTNKWGRLSKTFLCGGKDGEMYWVDESIGRCCSILEIMQETNKNLQEVLFDKTYRFQDKINKFNADLRGNKTVKDQIDDIYDEMPSVFVRSVTQTIAVLDDVVRAAKCAPNKIYIEVTRADQEKKETKSRYDALKEVIKKELKDEADRRDSLLEKLEYANNSRKLRSINVYLYFLQLGIDFYTGEPIKDLNDVINGIYDKDHIVPQSLRPDDSIDNLVLVNKDYNEKVKRDIYPIVAPIRNEKTLKLWKSYHKRKLISDKKYNSLIRTTELTYEEINDFVNSQINVVNFSNVQLKRILELKYPDTKVCFTKAIYASSLRQKLSIAKMRDLNDSHHAVDAYLNIVGGDILSNLYTDVFYLYDEKKNKKKNVSFDMEKRLHNYIEDNNLKDKIRTNCFRHDALITYKPKFSTSKKAGDLYKETIFEKADKDSVNLIPCHTKGPMKDTKKYGGYSQINQSYILAVEYTSGKKTVKKLLRVPTMYLNLYGNNEEELLKLIVNDEKAKDIKILRKIYINQKIKYNGCYYRIFTKGKNNIYKMAYQNYIDNNIVLYLNKSLKLSDDLIDKTIDSQTFIINNKGEKFIISKEKNKIIFDTIKERMFNKRYDECSYFEKAREMKFEIFNNLSLKEQISTLINMLKLLSCSTESVNINAEFKVEKRLLFVNSPDITKEEIYIVNESPSGLFKGKEELI

SEQ ID NO: 877 - protein, 1387 aa, synthetic construct
  REGION 1..1387: note = MG44-492 effector
MKELNLGLDIGTNSIGWALVDENGEIVKKNGFRFWGVRMFDEAQTAAERRTNRSSRRRLRRRRQRIEWLQEEFKNEIEKQDKNFFQRLNDSFYKIEDKRLQNKYTFFDDNYTDKDYFEKYPTIYHLRKALLEKEEKADIRELYLAIHHIIKYRGHFLNEGETFNPSDSEIVREIFENFNDELKEYANQYEDDEEYFQIIDIEKHNFYNTLQNIMLTKGSKSDRENQLRELMGVEKKTLANELLIKLLIYGKTNPKNFAFVKEENYQTSEIKLDDEEIQEKITENKKTIRELSRIFDYVDNIKLITDYYYLLDLLGVNDETKKCNESISNAMVNTYDKHQKDLKELKRVIKTYLPLAKYKECFKEYNDANYSKYVGSVSSNGEIKRFGHCSKEKFEEYIKKLLAEIKDVEAQESVNRIIEKIDNGDFLPKQNSGQNTTIPMQLNLYELRIILNKQAKYHPFLLEKENGLTRIERIVSIFEYHIPYYVGPLSNANNNQFSWLERKPEPIRPWNFNEVINIDASATNFIKRMQNKCTYLQGPTDYCLPKMSLLFSEYNCLQYLNKLRIGGSLIDKNAKEKIFNDFFLVYQNPTKKKLSEFIYTNFGVECNDIAEINCNMSSWITLKSIFKDEFNTKKEDGTIEAIIKDITLFEDKKILEKRFDELYHLSKKQTKALKGLNYKGYSSLCKKLLDELVCVNHITGEVSPTIIEIMRDTNLNLQEILYSKDYPFIDAIDEYNKKTNNVEVDFRTFIDENLYVSPIMKRSLIQTYRLIEEIERIFGRKINKYYIECARTNKAAKKETNSRYKNLSELYKSCISIQNQLLKENIELKYLKKQLEENKNKLSIDALYLYFTQLGKCMYTLNNIDIEDVIKGEKYDIDHIYPQSLIKDDSISNRVLVDNVKNQSVKGNKFLYQTGLITARNKAFYKMLLEKKLITKEKYRRLTEVNVDATVLEGFVNRQLVSTNQSVKGVIQLLKKYKNVKNSDIIFSKAENISDFRNEYDMLKSRTANNFHHAHDAYLNVVIGRAINTYYEKNRILGINDVYKIQDEVKTLNPLKILKCRKIYDLSGKLVWDLKENISKIEKYLYHVFDIHETLRTYTSSEMFSKVSILPAPKGTVMIKSSDDKMDINKYGGITSYKYCRYAIVEAIDKKGKAEYILEAIPTAFKNKIGQYLKSILTKKYKEFKIINDNIPVNVIVKNNKLKFYVRGRSGENVYVVRNAYDRIFSKDAIRIIRSIDKYNDLLKKKVEMVSVDNTIIVSPSKKLKNGQKTKEIIITVDDCVSLIEEIKKVYSKDIYAYSPIISLTAKLNEISDYSSYKTEDLVKMISEILILLKTNERSTADLSIINLSKQFGTISQNKKLSSGMKLMAESITGYFEQEIFEVPRGI

SEQ ID NO: 878 - protein, 1383 aa, synthetic construct
  REGION 1..1383: note = MG44-493 effector
MAKQKILCGLDIGTNSVGWCVTDENNKVIKKQGKSLWGVRMFEEAKDAKERRGFRSSRRRLKRRKERLSLLQSLFSIPMNEVDASFFYRLSNSFYHNEDREHPFQYTLFNSVNYTDKQYYDEFPTIYHLRKHLLESKEKEDLRFIYLALHHMIKYRGNFLSEGTSFKPLDKESADSDFRALQALIEEESRFEGENISYDDNIFEELKIANKNIKRLGDLQDRFNELLNPLKNGFIKSNIIPLMLGKKIKIKSLKLEDSEEKLELKEVCPADENYEDNIQLILASYPEEENLVEILLLLQKIYQFFLLGKLLGDHQYLCNAMVERYEKHHNDLKQLKAYIRKYHNEDYGRLFRKPRKKGEKEEANYSSYVGSYIVNGEEPCRFGRGGKQEEFFKLIKSILAQDNNQEAKDIIQSIDNKDYLPLLNSTSNGVFPYQLNLLEMKVILENQSKHYEFLNERDEDGTIAEKIISLLTFKIPYYVGPLSSKANHSWIVRKEGKIYPWNFYRMVKKDDTAAEFIKRMLNRCSYLPSEYCLPKDSLIFTYYNVLSFLNKLQVNGDYLDYEEKMELISLFKTKRKVNVKEIENFFKHKNPGTEVSITTSNGKGLSNIACNMSSYYDFANIYSPKYVDSHTDEIEAIIQDIVIFEDKQILEERLKNTHGIKDISIIKKIKGLNYTKYGRLSKELLVGLKAANQETGELYGSILHIMEHSNMNLQEIIHAEEFNFQALIDDYNQTHSSSDKKDTIEGYVDTLYVNPGMRRGLIQAYKIIEELEKILKRPIDEFYVECARTNKEKKQPSSSRKQKLIILYNEAIKATKDAQDLKSLLNHLESMDENQFQSDKFYLYFLQMGRCMYSGDPIDIDSLFDTSKYDIDHIIPQALIKDDSFNNRVLVKQELNREKTAVYPIQSSLLFHGDKSKAFAFYRYLKDMKLMSEDKFARLTRTQPLKDEEYAAFANRQLVYTNQAVAGLISAIQYFKRDSGHMPRIIYSKAENVSDFRKVFELVKSRTANNFHHAHDAYLNIVVGRTLDSYFSPFKQNKDTIHQMHLENKTTNPLKVFTANYKVFDLSGNLVWDKENSLQEIRHQLYECYDILTTTRTFYRSGLFSKETIYKKGGKGSNIGVKENGPLSSTQKYGGLDGYAYGSFALIKSNNVVILEGIPNIFKYQTTEYLATLYSNFELLIPNLKINTVFLQENKKYCVTAKGDNRISLCNLFESRFNYEELVIIHKLEKLQKKIKGFSGNETFEGLQKIGLILKSTSIVISIAKNKSAKQIELFDDECNKLYEVMQNMFGKSIYSYSQVSQIASLLSEQKDYFKNLTLIAKSKVLLNLLSLLSCNESKAIDLTLLNGSKTMGKLRINKKLKNCKIIIESYTGFYTKVIWEIK

SEQ ID NO: 879 - protein, 779 aa, synthetic construct
  REGION 1..779: note = MG44-494 effector
MASYYDFSKIFGEDYIKNNIDEIENIILDIVIFEDKEILESRLRNEYSLSNEQVKKLKGLSYSKYSNISKTLLTNIKYFDENGELKKSIIKIMEETNQNLQEIIFNEKYNFQNEIDKYNKEHLPSDKIVKIEDYVKELGTVSPIMKRPLIQAFKICEELEKIIGQPINEYYVECTRTNEKIKQRKNSRLENLKKLYQEAEQTLKNDPSYINALKELKNCDENKFQSDKYFLYFSQLGKCAYSGEPIDISELFNTDKYDIDHIIPQSIIKDDSLENRVLVKQELNRSKSDNYPISQNILFKGNRIAANNFYKLLYDAKLIGSKKYQNLIRTSELSNEELSSFVNRQLVSTNQAVKGLINAIKYFKETDTFKPKIIFSKANIVSDFRKEFDIVKSRNVNNFHHAHDAYLNIIVGRTIDTYFAPFLQNEYTLSLMHSKNLTTNPINIFKNKNNNKSNIYDKKGNLVLDYNNSLAQINKNIFNRFDILTTTRTYYGTKLLNKVTIYKKGEGNIPVKTTNCLNDVSKYGGFTGYAFGSYCLIKTNNSYVLEAIPTMFSKNINDYLAKVLNYTNFEIIIEKLNINTVFESNNKKFAITGKTGNQYTLLNLNERLFNKDNIKIIKKIEKVISKLTEKKISINGKENIEDIKQIFILKNDDEIIVSPSSNDKVKEITLNSNELLDLYHYFIELFNKPIYSFSASKSISLELQNNENKFNELSIFRKIKVLFNLCDFLKCNERKAIDLTLLDLSKNCGILYQGKKLSNCQIIYESITGFYRKVVYKID

SEQ ID NO: 880 - protein, 1378 aa, synthetic construct
  REGION 1..1378: note = MG44-495 effector
MEKKYYIGLDLGTSSVGWAATDENYNFLRLKGKTAWGARIFSEAVDCKERRSFRSNKRRVARRKYRLLLLKNLFAEEMAKVDKTFFLRLENSTYWAEDKAKDSEGNDLGKTLIFKTTEEEREFHKTYPTTWHLRKKLVDNDEQALSDLRLVYLAIHHIMKYRGNFLSDGTKDNEEPSKDTIDRINVILNLLEAKDNESGISDNITYLSKESYNDLIETLEDKNLNKTKKQDKIKKLFKNVDKTNEDIKVYIDLFKTLVTGGVFSVKKINEEYDKLKIDFNNGFDDNADEISKALGDAYELVLIAKAYNDYISLKDLLGGKPYLSYVMADIYDEHKKDLKSLKKILVSIDYKLGNEGSNRVYNLVFKPVIVPKEERKDKDGKKNKKLTTPNYASFIQGDDVEKKSVTLENLNKNIKEILEANKQYVDEIDKEEFDRLLDKASNNELFKKQATVSTSLIPHQCHLKELKIILENAGKKYHFIKENSDKIIQLFKFRVPYYYGPLNNESKEHAWIVKNEGKERTKITPWNIDEVVDKGRTREGFFKKLTNSCTYLVGETVLPKVSLVYEKYLALERLNKMQVNGNYLNHSDKMDLLNYVLGNSNTTIENIRKKLASDTGMKINDIVISNIKNNVPFTATSHAFFRKHFNLENSEEFELCEEVIKYATIYADDKKELKKFLSENFSFDEKLIKEIANLQTNKWGRLSKKFLCGGAKDEMYYTDENGVMYTILDLLEETNQNLQEIVNSGKYGFDEKIKEFNDALTKDETIDEQISKILEGTPALMVRSITQTIKVVDDVIKAAKCEPKKIIMEVTRTDEKKGQEVASRYIQLKKKISEDKGIDDKEREELLSDLEEANKTKKLKGKHLYLYFSQLGIDLYTGKKMKIEEVLEGKYDIDHIVPQSLIKDDSLDNQVLVNKKYNQDVKKDIYPICDEIRSKMLNLWYNYKERGIIKEEKYNRLIRTTDLTDDEINDFVKRQINVVNYSNVQIKRIFELKYPDTEIIFSKAGFPSLLRKEYEIAKMRDLNDAHHAVDAYLNIVCGDILTSLYTDVFYLIKRKKEKKENPTFNMERRLLGYIKKNDLMNKIKSNCLRHDALITFKPDYDSGMFYKQTIFKKSGDKETGLIPLHTKGPMSDVKKYGGYSSLSQSYLLAVEYKVKKKTIKKLLRAPTMYVKLYGDDLNTIAKLMIDDEMATDIKVLRKIYLNQKIKYNGCYYLIYTKNEFVNKYKMAYQNYIDNDALVYLNKCLKKTDELDDKDKTEQEIIVNKDGDKLKITKEENLKIFKLIKEQYSKQIYESTPYIAKSKEMPEDAFNNLSIKKQIDTLFNMIKILSRSNEDAKFDKSLNNGSSKYFLKVNTITDDKIYIVNESPSGLFKGKEELI

SEQ ID NO: 881 - protein, 906 aa, synthetic construct
  REGION 1..906: note = MG44-496 effector
PYYVGPLSYAGTIKDKNGVASGHWAVRNIGKENEKITPWNFDEVINKAASNREFMRRMTNKCTYLRGEDVLPKRSIIYQKFDVLNQLNKLRVNDKPISVELKNKIYNNLFLTKKKVTDKGIKDLLVREGIISEKERGQTELTGKDGEFKANMSSYITFCELFGKEFVDSDLEKSDSVCENIILWHTLNEDKKLVEQLILENYGKIPQIKSNIKVLKGLSFKEFGRLSKRFLTGLAIADKATGEYVGGVLDVLENTNLNLNELLFDVRFNLAETLAEENGETDSAVNFDDVNELYVSPAVKRGVWQAIKMADEYVSVLGRVPNKIFVEVTRENDPKKKGVRTFSRKDELLKKYKAMKNAEDYKDVIDALSGNETYDDMKLRSEKLFLYFCQLGRCAYTGERIDLSLLNSAYDVDHILPRTYIKDDSLDNKVLVKREKNATKDDDYPLPQGFTDQRPLWGFLKNAGLMSKTKFDRLTRVEPLNDDDYNYFINRQKVITDQTAKAVAELLQRKYPNTKIVYSKAGNVSDFRDKFSLFKCRETNDLHHARDAYLNVVVGNVYDVCFPSYINTMRKQEDEWRRRNLKNLFLRNREGAWVKDSDLSITSVKNTYGKHTMAVTRMATVGKGGFYNQTVYKKGDAGISVGRKGEGVIADFEKYGGYKSLSTAYFAVVGSLDKKCNLKKTIEAVPVLIEYKAKNDKNAVINYFSEYIDSPKIIVPQIKTKQLIRYNGTPFYIAGGSRYDARILAYNASQLFTDNKTDEYFKAVKKLLDMNKTVKQKTESEEFVMKTNNEGVRKLVITRQSNIEKYDLLAAQLGKDFYQVLSPFRNVKKIIDEGKKKFCELLVIDQCYVLMQILSYLQCKGATAELQLIGGSGRSGQIRFNKDITDVDFRIYDTSPTGLFVKESKA

SEQ ID NO: 882 - protein, 1393 aa, synthetic construct
  REGION 1..1393: note = MG44-497 effector
MKNNEETLKKLRLGLDIGTNSVGYALLDENNKLIKKNGHTFWGVRMFDEAETAKDRGSYRKSRRRLLRRKERMEILRSFFTKEICDIDPTFFERLDDSFYYKEDKKNKNTYNLFTSEYTDKDFYLEYPTIYHLRKAMQEEDKKFDIRMVYLAIAHIIKYRGNFLYPGEEFSTSEYTSIKQFFLDFNDILDELSNELEDNEDYSAEYFDKIENINDDFLEKLKVILMEIKGISNKKKELLDLFNVNKKSIYNELVIPFISGSAKVNISSLSVIKNSKYPKTEISLGSEELEGQVEEAISVAPEIKSVLEMIIKIKEISDFYFINKILSDSKTISESMVKMYDEHNEDLKKLKGFFKKYAEDQYNEIFKIRDEKLANYVAYVGFNKLRKNKVERFKHASREEFYGYLKQKLNNIKYAEAQEEIKYFIDKIDNNEFLLKQNSNQNGAFPMQLHLKELKTILNNQEKYYPFLSEGNDGYSIKEKIILTFKYKIPYYVGPLNKESKYSWVVREDEKIYPWNFDKVVKLDETAEKFILRMQNKCTYLKGDNDYCLPKNSLIFSEYSCLSYLNKLSINGKPIDPIMKSKIFNEVFLIKKQPTKKDIIEFIKTNYNADALTTTEKELPEATCNMASYIKMKEIFGKDFNDNKEMIENIIKDITIFEDKSILGNRLKELYKLNNDRIKQIKGLNYKGYSRLSKNLLVGLQIVDNQTGEIKGNVIEVMRKTNLNLQEILYLDGYRLIDAIDEYNRKNSLNDSYLCARDYIAENLVISPSFKRALIQTCSIIQEIERIFHKKIDEFYVEVTRTNKDKNKGKTTSSRYDKIKKIYSSCQELAMAYNFDMKRLKNELESNKDNLKSDILYFYFTQLGKCMYSLEDIDISDLTNNYHYDIDHIYPQSIIKDDSLSNRVLVDKKKNAAKTDKFLFEAKVLNPKAQQFYKKLLSLELISKEKYRRLTQKEISKDELEGFVNRQLVSTNQSVMGLIKLLKEYYKVDEKNIIYSKGENVSDFRHTFDLVKSRTANNFHHAHDAYLNVVVGGILNKYYTSRRFYQFSDIARIENEGESLNPSRIFTKRDILKANGKVIWDKKEDIKRIEKDLYHRFDITETIRTYNPNKMYSKVTILPKGEGESAVPFQTTTPQVDVEKYGGITSNKFSRYVIIEAHGKKGLDTILEAIPKTACGDNNKIEKDIDNYIASLDEYQKYTSYKVVNYNIKANVVIQEGSFKYIITGKSGNQYVLQNVQDRFFSKKAMITIKNIDKYLNNKKLGIIMAKDNEKIIVSPARGKNNEEIFFEKTELVNLLKEIKTMYSKDIYSFSAIQNIVNNIDCSIDYSIDDFIIICNNLLQILKTNERKNADLRLIHLSGNSGTLYLGKKLKSGMKFIWQSITGYYEEILYEVK

SEQ ID NO: 883 - protein, 1416 aa, synthetic construct; identical to SEQ ID NO: 112
  REGION 1..1416: note = MG44-498 effector

SEQ ID NO: 884 - protein, 1390 aa, synthetic construct
  REGION 1..1390: note = MG44-499 effector
METIKKFKLGLDIGTNSVGYALLDENNKVVRKNGHSFWGVRMFEESSDAKSRRNYRSNRRRLQRRKQRIVLLQKLFNEEIKKVDKNFFIRLNDSFYKVEDKHLHNTYNLFADKNYSDYDFFKQFPTIYHLRKYLMETKQKVDIRFLYLAIAHILKYRGNFLSSGEEFKQSDFSMIRVKLEDINSTLVDLSQNFSENENYDEEYFERIDINQNNFFDDLKKCMVEEKGLNNKKKKLLTLFNVGKKTLVNEFVIPLIAGSTINLSNISIIKNEKYEKVEVSLDSEDLEAKQNDACTIIKELSPILCKIELLKEVFDYYYVLKILKGVPTISDAMVKIYDDHQQDLIRLKKLIKKYKPEIYSKMFRELVEEDKEKKKNKIIMNYPRYVGYNKVGVYSFSDKQTERFGHASRQDFYKFIKEQLAKITDESAQDEIKYFLDKIDNDDFLLKQKSNKNGALPMQLHLAELKMILNNQKENYPFLNEKDSDGLTISDKIISIFKFKIPYYVGPLNIKSDFAWIERNNEKIYPWNFEKVVDLDQSAIKFIERMQNKCTYLKGENDYCLPKSSIIFSEYNCLSYLNKLRINGEYISNTLKEKIYNELFLNIEKKQPTRKDLKEFIEANYGDNALVVNIKEIPEINCNMASYIDMKRIFGNDFDKYKDIYENIIKDITVFEDKAALEKRLSTYNLPKEIIKRLKGLNYNKYSSLSGRLLNGITIFNPKTGEVQGTVLEIMRKTNLNLQEILYLEDYKLIDIIDKENKKNESIDDKKIEEYLDEYVNISPLYKRPLIQSYRIIKEIETIFNRPIDEYYIECTRTSKALKKQSSSRYETLKELYKNCEKDALSMNIDMNELEKNLDECKDSLKSDILYLYFTQLGRCMYTLEPIDISELKNNKKYDIDHIYPQAIIKDDSLSNRVLVDKTKNNKKSDIFLYESDVLNPNAYSFFKKLYDMRLISKEKYNRLTEKEIPESKLDSFVNRQLVTTNQAVTGLIQVLKEYHNVNPINIVYSKSENVTDFRKKFDLVKSRTANNFHHAHDAYLNVVVGGIIHKYFSYRHFNNKYKDIIRMKNERQTLNVDKLLDRDIVKNGEKIIWNKNEMIKQIKHDLYQRFDISETIRTYNSNELFTKVTILPASKDKLVPVKSSNAKSLTQKYGGLKSDSFYKYIIIETNEKNKKKIALEAIPKSAEKDLDGYLKSKGYSNYSIINDNIKINTCVMLEDRKFVITGKTNDSYVLKNTYDRFFSYEDMKIIKKIDKYLDNKSKKVDMNISDDKIIISPARSEKNKEIVLTLQETNKLLDDIFNMYSKKIYSYSSIKTIIENKNKTINLSFLDKIIVCSELLYLLKTNERKSADLQLLGQSKDSGILKISKNLPIGTKLIEESYTGYYKKVIYEVK

SEQ ID NO: 885 - protein, 1378 aa, synthetic construct
  REGION 1..1378: note = MG44-500 effector
MEKKYYIGLDLGTSSVGWAATDENYNFLRLKGKTAWGARIFSEAVDCKGRRSFRSSKRRVARRKYRLLLLKNLFAEEMAKVDKTFFLRLENSTYWAEDKAKDSEGNDLGKTLIFKTTEEEREFHKTYPTTWHLRKKLVDNDEQALSDLRLVYLAIHHIMKYRGNFLSDGTKDNEEPSKDTIDRINVILNLLEAKDNESGISDNITYLSKESYNDLIETLEDKNLNKTKKQDKIKKLFKNVDKTNEDIKVYIDLFKTLVTGGVFSVKKINEEYDKLKIDFNNGFDDNADEISKALGDAYELVLIAKAYNDYISLKDLLGGKPYLSYVMADIYDEHKKDLKSLKKILVSIDYKLGNEGSNRVYNLVFKPVIVPKEERKDKDGKKNKKLTTPNYASFIQGDDVEKKSVTLENLNKNIKEILEANKQYVDEIDKEEFDRLLDKASNNELFKKQATVSTSSIPHQCHLKELNKILENAGEKYPFIKENSDKIIQLFKFRVPYYYGPLNNESKEHAWIVKNEGKERTKITPWNIDEVVDKGRTREGFFKKLTNSCTYLVGETVLPKVSLVYEKYLALERLNKMQVNGNYLNHSDKMDLLNYVLGNSNTTIENIRKKLASDTGMKINDIVISNIKNNVPFTATSHAFFRKHFNLENSEEFELCEEVIKYATIYADDKKELKKFLSENFSFDEKLIKEIANLQTNKWGRLSKKFLCGGAKDEMYYTDENGVMYTILGLLEETNQNLQEIVNSGKYGFDEKIKEFNDALTKDETIDEQISKILEGTPALMVRSITQTIKVVDDVIKAAKCEPKKIIMEVTRTDEKKGQEVASRYIQLKKKISEDKEIDDKEKEGLLSDLEEANKTKKLKGKHLYLYFSQLGIDLYTGKKMKIEEVLEGKYDIDHIVPQSLIKDDSLDNQVLVNKKYNQDVKKDIYPICDEIRSKMLNLWYNYKERGIIKEEKYNRLIRTTDLTDDEINDFVKRQINVVNYSNIQIKRIFELKYPDTEIIFSKAGFPSLLRKEYEIAKMRDLNDAHHAVDAYLNIVCGDILTSLYTDVFYLIKRKKEKKENPTFNMERRLLGYIKKNDLMDKIKSNCLRHDALITFKPDYDSGMFYKQTIFKKSGDKETGLIPLHTKGPMSDVKKYGGYSSLSQSYLLAVEYKVKKKTIKKLLRAPTMYVKLYGDDLNTIAKLMIDDEMATDIKVLRKIYLNQKIKYNGCYYLIYTKNEFVNKYKMAYQNYIDNDALVYLNKCLKKTDELDDKDKTEQEIIVNKDGDKLKITKEENLKIFKLIKEQYSKQIYESTPYIAKSKEMPEDAFNNLSIKKQIDTLFNMIKILSRSNEDAKFDKSLNNGSSKYFLKVNTITDDKIYIVNESPSGLFKGKEELI

SEQ ID NO: 886 - protein, 1381 aa, synthetic construct
  REGION 1..1381: note = MG44-501 effector
MEKKYYIGLDLGTSSVGWAATDENYNFLRLKGKTAWGARIFSEAVDCKGRRSFRSSKRRVARRKYRLLLLKNLFAEEMAKVDKTFFLRLENSTYWAEDKAKDAEGNGLGKTLIFKTTEEEREFHKAYPTTWHLRKKLVDNDEQALSDLRLVYLAIHHIMKYRGNFLSDGTKDNEEPSKDTIDRINVILNLLEAKDNESGISDNITYLSKESYNELIETLENKNLNKKKKQDEIKKLFKNVDKTNEDIKVYIDLFKTLVTGGVFSVKKINEEYDKLKIDFNNGFDDNADEISKALGDAYELVLIAKAYNDYISLKDLLGGKPYLSYVMAEIYDEHKKDLKSLKKILVSIDYKHGNEGNNRVYNLVFKPVIVPKEERKDKDGKKNKKLTTPNYASFIQGDDVEKKSVTLENLNKNIKEILEANKQYVDEKDKEEFDRLLDKASNNELFKKQATVSTSLIPHQCHLEELNKILENAGKKYPFIKENSDKIIQLFKFRVPYYYGPLNNESKEHAWIVKNEGKERTKITPWNIDEVVDKGRTREGFFKKLTNSCTYLVGETVLPKVSLVYEKYLALERLNKMQVNGNYLNHSDKMDLLNYVLGNSNTTIENIRKKLASDTGMKINDIVISNIKNNVPFTATSHAFFRKHFNLENSGEFELCEEVIKYATIYADDKKELKKFLSEHRDYFGFDEKLIKEIANLQTNKWGRLSKKFLCGGAKDEMYYTDENGVMYTILGLLEETNQNLQEIVNSGKYGFDEKIKEFNDALTKDETIDEQISKILEGTPALMVRSITQTIKVVDDVIKAAKCEPKKIIMEVTRTDEKKGQEVASRYIQLKKKISEDKEIDDKEREELLSDLEEANKTKKLKGKHLYLYFSQLGIDLYTGKKMKIEEVLEGKYDIDHIVPQSLIKDDSLDNQVLVNKKYNQDVKKDIYPICDEIRSKMLNLWYNYKERGIIKEEKYNRLIRTTDLTDDEINDFVKRQINVVNYSNIQIKRIFELKYHDTEIIFSKAGFPSLLRKEYEIAKMRDLNDAHHAVDAYLNIVCGDILTSLYTDVFYLIKRKKEKKENPTFNMERRLLGYIKKNDLMDKIKSNCLRHDALITFKPDYDSGMFYKQTIFKKSGDKETGLIPLHTKGPMSDVKKYGGYSQLSQSFILAVEYKVKKKTIKKLLRVPTMYVKLYGDDLNKIAKLMIDDEMATDIKVLRKIYLNQKIKYNGCYYLIYTKNEFVNKYKMAYQNYIDNDALVYLNKCLKKTDELDDKDKTEQEIIVNKDGDKLKITKEENLKIFKLIKEQYSKPIYESTPYIAKSKEMPEDVFNNLSIKKQIDTLFNMIKILSRSNEDAKFDKSLNNGSSKYFLKVNTITDDKIYIVNESPSGLFKGKEELI

SEQ ID NO: 887 - protein, 1386 aa, synthetic construct
  REGION 1..1386: note = MG44-502 effector
MAKQKILCGLDIGTNSVGWCVTNENNKVIKKQGKSLWGVRMFEEAKDAKERRGFRSSRRRLKRRKERLSLLQSLFSIPMNEVDASFFYRLSNSFYHNEDREHPFQYTLFNSVNYTDKQYYDEFPTIYHLRKHLLESKEKEDLRFIYLALHHMIKYRGNFLSEGTSFKPLDKESADSDFRALQALIEEESRFEGENISYDDNIFEELKIANKNIKRLGDLQDRFNELLNPLKNGFIKSNIIPLMLGKKIKIKNLKLEDSEEKLELKEVCPADENYEDNIQLILASYPEEENLVEILLLLQKIYQFFLLGKLLGDHQYLCNAMVERYEKHHSDLKQLKAYIRKYHNEDYGRLFRKPRKKGEKEEANYSSYVGSYIVNGEEPCRFGRGGKQEEFFKLIKSILAQDNNQEAKDIIQSIDNKDYLPLLNSTSNGVFPYQLNLLEMKVILENQSKYYEFLNERDEDGTIADKIISLLTFKIPYYVGPLSNKASHSWIVRKEGKIYPWNFYRMVKKDDTAAEFIKRMLNRCSYLPSEYCLPKDSLIFTYYNVLSFLNKLQVNGDYLDYEEKMELISLFKTKRKVNVKEIENFFKHKNPGTEVSITTSNGKGLSNIACNMSSYYDFANIYSPEYVDSHTDEIEAIIQDIVIFEDKQILEERLKNTHGIEDISIIKKIKGLNYTKYGRLSKELLVGLKAANQETGELYGSILHIMEHSNMNLQEIIHAEEFNFQALIDDYNQAHSSSDKKDTIEGYVDTLYVNPGMRRGLIQAYKIIEELEKILKRPIDEFYVECSRQNKTKKGPNSSRKQQLIKLYKDAISATKDALEFKKLLNRLEEVDENQFQSDKFYLYFLQMGRCMYSGDPIELDSLFDTSKYDIDHIIPQSLIKDDSFTNRVLVKQELNREKTAVYPIQSSLLFHGDKSKAFAFYRYLKDMKLMSEDKFARLTRTQPLKDEEYAAFANRQLVFTNQAVAGLIGAIQYFKKDSDHMPRIIYSKAENVSDFRKVFELVKSRTANNFHHAHDAYLNIIVGRTLDSYFSPFKQNKDTIHQMHLEKKTTNPLKVFTSNYKVFDLSGNLVWDKENSLKEIRHQLYERYDILTTTRTYQGTTLFEKVTIYKKGEGNIGVKASGPLANASEYGGLEGFAFGFYTLIKTNKNYILEAIPTLFKNDIKEYLSTLYKEDYEIIVPILNINSVIMEGKKKYCITGKTGNQYVIKNLLERRFTYRELTIIHKLDKIQERLTKNKISLKGNETKEDLKKIGLYLKDNYLIVSIAKNKDVKQIELSNDECTELYDSLNNILNKEIYAYSASSTISTLLNEQRDYFEKSSIALKIKVLLNLLAYLKCNERKSVDLTLIYGKSKMGTLYLGKKIKPCKIIAESITGFYTKVIWEIK

SEQ ID NO: 888 - protein, 1398 aa, synthetic construct
  REGION 1..1398: note = MG44-503 effector
MENKYYVGIDLGTSSVGWAATDENYNFLRLKGKTAWGARLFDGANTCQKRRERRSKRRRMARRKYRLLLLNQLFAEEMAKVDKTFFLRLANSTYWAEDKAKDDKGNDLGKNIIFKTWKEESEFYNNYKTIWHLRNELVKNNDNAFSDLRLVYLAIHHIIKYRGNFLTEGDNFNEKPTVELIRELNSILSKLDEENSNDFLLDDEESIIEDENNKYISEDKLDKLLEILKSDEYKSKKEKQNDIDKLFVKNRSQLIKKYIDMYKVLVTGGSFKISRIDKELGDLEIDFNNGFDENLDEIKSKLGNAIDLVFNAKKIHDYNSLSKLFGDKNANKNLSQIMVDVYDNHKKDLRNLKKVIRSIDVKLDKKGKESLYYSIFRPIKLTKEDNKRDENNKKTKKSQTPNYASFVQGDDINFKYVTLEKLNDNLKEVLEKNKQYIDDEETYIDLHDKAEKGILLQKPANVSTSLIPHQSHLQELKIILKNASDRYPFIKEIEDKIIKLFMFKVPYYYGPLSTSKSHPYAWVETKEEGTKITPWNMYDVVDEEKTRNKFMKRLINSCSYLDGEPVLPKVSLCYEEYLVLDSLNKMMLNGQFLSPSVKESVLKYILSRSKTTIGNIKTFLKKENELYQNELKDDDISISNIKSDIIFNASSHALLSKYFDLEKDKEMVESLILLATIYAGDSKSLIEAINSNKNYKELTKEQVNAISKLPTNKWGRLSKTFLCGGKDGEMYWVDESIGRCCSILEIMQETNKNLQEVLFDKTYRFQDKINKFNADLRGNKTVKDQIDDIYDEMPSVFVRSVTQTIAVLDDVVRAAKCAPNKIYIEVTRADQEKKETKSRYDALKEVIKKELKDEADRRDSLLEKLEYANNSRKLRSINVYLYFLQLGIDFYTGEPIKDLNDVINGIYDKDHIVPQSLRPDDSIDNLVLVNKDYNEKVKRDIYPIVAPIRNEKTLKLWKSYHKRKLISDKKYNSLIRTTELTYEEINDFVNSQINVVNFSNVQLKRILELKYPDTKVCFTKAIYASSLRQKLSIAKMRDLNDSHHAVDAYLNIVGGDILSNLYTDVFYLYDEKKNKKKNVSFDMEKRLHNYIEDNNLKDKIRTNCFRHDALITYKPKFSTSKKAGDLYKETIFEKADKDSVNLIPCHTKGPMKDTKKYGGYSQINQSYILAVEYTSGKKTVKKLLRVPTMYLNLYGNNEEELLKLIVNDEKAKDIKILRKIYINQKIKYNGCYYRIFTKGKNNIYKMAYQNYIDNNIVLYLNKSLKLSDDLIDKTIDSQTFIINNKGEKFIISKEKNKIIFDTIKERMFNKRYDECSYFEKAREMKFEIFNNLSLKEQISTLINMLKLLSCSTESVNINAEFKVEKRLLFVNSPDITKEEIYIVNESPSGLFKEKEELI

SEQ ID NO: 889 - protein, 1398 aa, synthetic construct
  REGION 1..1398: note = MG44-504 effector
MENKYYVGIDLGTSSVGWAATDENYNFLRLKGKTAWGARLFDGANTCQKRRERRSKRRRMARRKYRLLLLNQLFAEEMAKVDKTFFLRLANSTYWAEDKAKDDKGNDLGKNIIFKTWKEESEFYNNYKTIWHLRNELVKNNDNAFSDLRLVYLAIHHIIKYRGNFLTEGDNFNEKPTVELIRELNSILSKLDEENSNDFLLDDEESIIEDENNKYISEDKLDKLLEILKSDEYKSKKDKQNDIDKLFVKNRSQLIKKYIDMYKVLVTGGSFKISRIDKELGDLEIDFNNGFDENLDEIKSKLGNAIDLVFNAKKIHDYNSLSKLFGDKNANKNLSQIMVDVYDNHKKDLRNLKKVVRSVDVKLDKKGKESLYYSIFRPIKLTKEDNKRDENNKKTKKSQTPNYASFVQGDDINFKYVTLEKLNDNLKEVLEKNKQYIDDEETYIDLHDKAEKGILLQKPANVSTSLIPHQSHLQELKIILKNASDRYPFIKEIEDKIIKLFMFKVPYYYGPLSTSKSHPYAWVETKEEGTKITPWNMYDVVDEEKTRNKFMKRLINSCSYLDGEPVLPKVSLCYEEYLVLDSLNKMMLNGQFLSPSVKESVLKYILSRSKTTIGNIKTFLKKENELYQNELKDDDISISNIKSDIIFNASSHALLSKYFDLEKDKEMVESLILLATIYAGDSKSLIEAINSNKNYKELTKEQVNAISKLPTNKWGRLSKTFLCGGKDGEMYWVDESIGRCCSILEIMQETNKNLQEVLFDKTYRFQDKINKFNADLRGNKTVKDQIDDIYDEMPSVFVRSVTQTIAVLDDVVRAAKCAPNKIYIEVTRADQEKKETKSRYDALKEVIKKELKDEADRRDSLLEKLEYANNSRKLRSINVYLYFLQLGIDFYTGEPIKDLNDVINGIYDKDHIVPQSLRPDDSIDNLVLVNKDYNEKVKRDIYPIVAPIRNEKTLKLWKSYHKRKLISDKKYNSLIRTTELTYEEINDFVNSQINVVNFSNVQLKRILELKYPDTKVCFTKAIYASSLRQKLSIAKMRDLNDSHHAVDAYLNIVGGDILSNLYTDVFYLYDEKKNKKKNVSFDMEKRLHNYIEDNNLKDKIRTNCFRHDALITYKPKFSTSKKAGDLYKETIFEKADKDSVNLIPCHTKGPMKDTKKYGGYSQINQSYILAVEYTSGKKTVKKLLRVPTMYLNLYGNNEEELLKLIVNDEKAKDIKILRKIYINQKIKYNGCYYRIFTKGKNNIYKMAYQNYIDNNIVLYLNKSLKLSDDLIDKTIDSQTFIINNKGEKFIISKEKNKIIFDTIKERMFNKRYDECSYFEKAREMKFEIFNNLSLKEQISTLINMLKLLSCSTESVNINAEFKVEKRLLFVNSPDITKEEIYIVNESPSGLFKGKEELI

SEQ ID NO: 890 - protein, 1267 aa, synthetic construct
  REGION 1..1267: note = MG44-505 effector
YDEFPTIYHLRKHLLESKEKEDLRFIYLALHHMIKYRGNFLSEGTSFKPLDKESADSDFRALQTLIKEESRFDGENISYNDTIFEELKIANKNIKRLGDLQDRFNELLNPLKNGFIKSNIIPLMLGKKIKIKNLKLEDSEEKLELKEICPADENYEDNVQLILASYPEEDNLVEILLLLQKIYQFFLLGKLLGDHQYLCNAMVERYEKHHNDLKQLKAYIRKYHNEDYGRLFRKPRKKGEKEETNYSSYIGSYIVNGEEPCRFGRGGKQEEFFKLVKSILAQDNNQEAKDIIQSIDNKDYLPLLNSTSNGVFPYQLNLLEMKVILESQSKHYEFLNERDEDGTIADKIISLLTFKIPYYVGPLSNKASHSWIVRKEGKIYPWNFYRMVKKDDTAAEFIKRMLNRCSYLPSEYCLPKDSLIFTYYNVLSFLNKLQVNGDYLDYEEKMELISLFKTKRKVNVKEIENFFKHKNPGTEVSITTSNGKGLSNIACNMSSYYDFANIYSPEYVDSHTDEIEAIIQDIVIFEDKQILEERLKNTHGIKDISIIKKIKGLNYTKYGRLSKELLVGLKAANQETGELYGSILHIMEHSNMNLQEIIHAEEFNFQALIDDYNQAHSSSDKKDTIEGYVDTLYVNPGMRRGLIQAYKIIEELEKILKRPIDEFYVECSRQNKTKKGPTSSRKQQLIKLYKDAISATKDALEFKKLLNRLEEVDENQFQSDKFYLYFLQMGRCMYSGDPIELDSLFDTSKYDIDHIIPQSLIKDDSFNNRVLVKQELNREKTAVYPIQSSLLFHGDKSKAFAFYRYLKDMKLMSEDKFARLTRTQPLKDEEYAAFANRQLVYTNQAVAGLISAIQYFKRDSGHMPRIIYSKAENVSDFRKVFELVKSRTANNFHHAHDAYLNIVVGRTLDSYFSPFKQNKDTIHQMHLEKKTTNPLKVFTSNYKVFDLSGNLVWDKENSLKEIRHQLYECYDILTTTRTYQGTTLFEKVTIYKKGEGNVGVKASGPLANASEYGGLTGYAFGFYTLIKIDRIYILEAIPTLFKNDIKEYLNTLYKEDYEIIVPILNINSVIMEGKKKYCITGKTGNQYLIKNLLERRFTYRELTIIHKLDKIQERLTKNKTSLKGTETEEDLKKLGLYLKENYLIVSIAKNKDAKQIELSYDECSELYDSINNILNKEIYAYSASSTISTLLNEQRDYFEKSSIALKIKVLLNLLNFLKCNERKSVDLTLLKGKSAMGILLISKKIKPCKIIAESITGFYTKIIWEIK

SEQ ID NO: 891 - protein, 587 aa, synthetic construct
  REGION 1..587: note = MG44-506 effector
RVPDKIFIEVTRQEDEKKKPTVSRKNRLLEEYKGLGEDCRNIDELLTELNDKTDSQLRQERVYLYFKQLGRCAYTGQLIRLDELNSDLYDVDHIMPQSVTKDDSLENKVLVKREKNAQKSDQYPLPVGFTDQQRFWKLLKDKGLMGEKKYALLTRTQPLTEEDFRDFINRQLVVTNQTVKAVAELLKRKYGGQGTRIVYSKAKNVDDFKQKYGLIKCRETNDLHHARDAYLNVVVGNVYDTKFTSAYDYYYRKNDAWREYNLKTLFERPTKDAWGGRDGIVSVKSVLRKPSMQVTRYAYTNKGEFYNETIYGKEDGGISAPRKAVKPYDKTEKYGGFKSLTTAYFAVVESKDKKGKLIKTIEAIPVLVDYQSKGDEEKVLAYLSQIGLREPRLLIPKIKIKSLVSVNGFKVWVAGVTGRQLLLHNAQQWFTDEKTDLYIKNLGKLVEWERTGKIAEEERMKENFPMVKNRKEEVSVLIDRPQNVALYREIVTKLHSKLYQGLSAARSFAEKLSAKEEIFLSLSVLEQAKVLLQIIRFMKCNAEAADLSLLKDGAACGKLLIGKNITDVDFKVIHQSPCGLSTYIQRT

SEQ ID NO: 892 - protein, 1390 aa, synthetic construct
  REGION 1..1390: note = MG44-507 effector
MKELNLGLDIGTNSIGWALVDENGEIVKKKGFRFWGVRMFDEAKTAADRRGKRTSRRRLRRRRQRIEWLQDEFRQEIEKVDSTFFQRINDSYYKIEDKKLQNKYTFFDDDFTDQDYFNEFPTIYHLRKKLVETDEKADIRMLYLALHHIIKYRGHFLNEGEEFNSSDSKVVEEVFKTINDELKEYANQNEDDETYFQVINLDNPDFFIELQEIMLSKSLKRSEKENSLRVLMDVEKKTLVSEFVIKLLIYGKVSPKNFSFIKDQKYQTKDLNLCDEELHSAIYENKKTITELSSIFDYVENIKLVSDFYYLLNLLGKDPKTHECNRSLSYAMVNSYEQHQDDLKELKGLIKTYLPNKYDECFRKEDEKLCNYVRYVGMVSANGKIKRFAHCKKEEFGGYIKKLLDLIKDENAQKTIKEIGKRIDNNEYMPRQNSGQNTSIPMQLNLFELKSILEKQVQFYPFLKEENEGYTRIERIISIFTHHIPYYVGPLSNANHNQFSWIERKPLAIRPWNFDEVVDKDASAKNFIQRMQNKCTYLQGPTNYCLPKMSLLFSEFNCLQYLNKLRIGGALIDSMRKTKIFNDFFLVYSSPTKKKLKDFIYTNFGIECDDIPEVNCNMASWIKFKEIFKEDFDKKREDNTIEEIIKDITLFEDKKIIERRCKEIYHLTDEQIKAIKGVNYKGYSSLCRKLLDDLRCVNQRTGEESPTIIEIMRETNLNLQEIIYSQEYSFLEAIDKYNKGISNNDMDFRTFIDENLYVSPMMKRALIQTYRLIEEIERIFKRPIDKYYIECTRTNKAEKKPTDTRYSHLKELYKACSNMADEFRKVNVNFKELSKQLDENKDKLSIDALYLYFTQLGKCMYTLEDITNIEGIIRGSKYDIDHIYPQSLIKDDSISNRVLVDKVMNQQVKKNQFLCDTNIVTAKHRQFYKMLLDKNLITKEKYRRLTETKIDESTLNGFVNRQLVATNQAVKGVIQLLKKYKKIDNNDIIYSKAENISDFRNEFEMLKSRTANNFHHAHDAYLNVIIGRAIDTYYKVNKITSTKDVLKIQNEKKTLNPMSIIKYKKVFDLQGKLVWDLSTYIPKIEKYVYHIFDIHETMRTKTSNEMFEKVSVLPAGGKGTVKIKSSDNKMSIQKYGGITSYSYCKYCLVETVNKKNKTEYILEAIPTPFKSRVQEYIESTYQNKYMQYKIIKNNIPTNSIIENGALKFYITGKTVNSYFIKNANDRFFSKEAIEIIRKIDKYNEKIKRKCAEEPIDNSILVSPAKVLKNGKTTKEIVITMNDCLSLLEEIKIMYSKNIFAFPPIIELIKTLNEILDFTKYNIKELVEIISQILLLLKTNERKTCDLSLIDLVSNFGTLRINKKLSTGMKLISESLTGYFSEVIFEVPNGI

SEQ ID NO: 893 - protein, 1614 aa, synthetic construct
  REGION 1..1614: note = MG44-508 effector
MENSNNSSKKYYLGLDMGTDSCGWCVTDDKYNIIRSHKKIYGPDGKLVKREGCHLWGSRLFGPANTAKSRRLNRTARRRLARRRRRIILLRELFQPEIDKVDPNFFKRLDQSNLWNEDKDKELQMEHNFLFNDKDLTDKEYYKDFPTIYHLRKAMVNGLTINGHYYDQKKQFDIREVYLVLAHMIKYRGNFLMEGDVKGSVVDPTYLKQCFDNIDNLIKNSIDEDNADKEDDDKIISSEYCFNVDIKRADRLINLFKNESGKQNLKDSEKIEFGKNLTGIRQSLLSLINGSAVSLKDLLPKDQILDEEFGKNKIDFSKESFENDLDSYNLNDFYSQVLLEAKKIYDFRILAHLLHDNRLLCDAMVNVYKEHKEQLAALKRLYKKFATKEQYYFMFRDPKILGLGDSNGKNKKKSKVKNQPKASYVSYIGYTKTSGKRKYTGAHVTKEETIDDLIKQIKDDIGSSIGKYAKYIISKENAYKKDKKGKETLKVGAYEVRLSNNNPNNEETIFYTANDETLIGNEKKDNPYFSEDSKEKEDSVLIMKVLESKIRFLPRQNSRNNGVFPYQLNLNEMKTIIENQSKYYPFLKDKAPSFPDGKTDEYKIVSLLKFKIPYYIGPLSQPNDYVRDDKRDNHWVQFKGENNQGIINPWNFSQIVDLEGTADKFISNLTNYCTYIFGENTLPKESLIFQAYKVLNDLNNLKVNESLISKEDKDYIIQNVYLKKKKIKGKDIRDALIKKYKNPTIRIITKGSGKEVGEEEVDLTMFNSSLSSFIDMCDERGFGNDFYKNESLFNKAEKVIELITIFEDKKLLKERLKKEGLNEEQVKYFSTKSYSGWAPLSRKLLDGITVDCDNEITGERYPVTIIDVMHDTPLNFTEIFATKNSHFSGFMEEVIKLNDEKKICRDDLIDELYASPAMKRCVRQTFKIIKELEDTLNINHFDRIFVETTRAPGDMGKIIKSRRKQIDSAYKAAKKVVGEEVNDLVGQLNNCSDDELRSKKIYLYFMQLGKSVYSGEKINLNNLENYDIDHIIPQSKLKDDSFDNIVLVEKALNNKKQDIYPIQDNILSKEGKKWIDILSQIKGENGKSYLMPKDKKNKLLRPSEKELTSSELNGFINRQLTMTNQSVKAVCDILKMTERDSDIVYSKANLVSDFRKLCGELSFRKFCGELSPYYAFVKVRDINDFHHANDAYLNIVVGNVYYEKFKDFYKYNHVEYDTNGKKDLSVLASKLFTKTQADDKTGNIYWEAHFHNEKEIDANGKESTIKVRDEGTESTFDKIEHYMELNDPLVTQMRYTQKGDQGLFGHITLMKKAKIKENNTDKYYPLKQHLRSNGEVMDVNKYGGYSNMITPYYLLVKSDNEEGKHIYSLESIPTIYLNSFKNEKEDIVNYLSKKNKLKNPIVLLDKLLIRTIVKIPYYSNNDSHFSLLKLGITGRSENDITYINLSELILSIKWKNYYKKISNLLGTNVSSSKAKDLSKYTEQMKNDPTSTLVDGTNRVEHGKNNSFYSYLIDNVISKPIFEGLPKTGCSFIKLESKYDEFCSLNTLEQAKIIATIIKLLSCKSVQKQDLSLLSDLPSQLGEIAQNKELPCGSEISYESCCGLKEYILFVVPND

SEQ ID NO: 894 - protein, 1378 aa, synthetic construct
  REGION 1..1378: note = MG44-509 effector
MEKKYYIGLDLGTSSVGWAATDENYNFLRLKGKTAWGARIFSEAVDCKGRRSFRSSKRRVARRKYRLLLLKNLFAEEMAKVDKTFFLRLENSTYWAEDKAKDAEGNNLGKTLIFKTTEEEREFHKTYPTTWHLRKKLVDNDEQALSDLRLVYLAIHHIMKYRGNFLSDGTKDNEEPSKDTIDRINVILNLLEAKDNESGISDNITYLSKESYNELIETLEDKNLNKTKKQDKIKKLFKNVDKTNEDIKVYIDLFKTLVTGGVFSVKKINEEYDKLKIDFNNGFDDNADEISKALGDAYELVLIAKAYNDYISLKDLLGGNPYLSYVMADIYDEHKKDLRSLKKILISIDNKLGNEGSNRVYNLVFKPVIVPKEERKDKDGKKNKKLTTPNYASFIQGDDVEKKSVTLENLNKNIKEILEANKQYVDEIDKEEFDRLLDKASNNELFKKQATVSTSSIPHQCHLKELKIILENAGKKYQFIKENSDKIIQLFKFRVPYYYGPLNNESKEHAWIVKNEGKERTKITPWNIDEVVNKEKTREGFFKKLTNSCTYLVGETVLPKVSLVYEKYLALERLNKMQVNGNYLNHSDKMDLLNYVLGNSNTTIENIRKKLASDTGMKINDIVISNIKNNVPFTATSHAFFRKRFNLENSEEFELCEEVIKYATIYADDKKELKKFLSENFSFDEKLIKEIANLQTNKWGRLSKKFLCGGAKDEMYYTDENGVMYTILGLLEEINQNLQEIVNSGKYGFDEKIKEFNDALTKDETIDEQISKILEGTPALMVRSITQTIKVVDDVIKAAKCEPKKIIMEVTRTDEKKGQEVASRYIQLKKKISEDKGIDDKEREELLSDLEEANKTKKLKGKHLYLYFSQLGIDLYTGKKMKIEEVLEGKYDIDHIVPQSLIKDDSLDNQVLVNKKYNQDVKKDIYPICDEIRSKMLNLWYNYKERGIIKEEKYNRLIRTTDLTDDEINDFVKRQINVVNYSNIQIKRIFELKYSDTEIIFSKAGFPSLLRKEYEIAKMRDLNDAHHAVDAYLNIVCGDILTSLYTDVFYLIKRKKEKKENPTFNMERRLLGYIKKNDLMNKIKSNCLRHDALITFKPDYDSGMFYKQTIFKKSGDKETGLIPLHTKGPMSDVKKYGGYSSLSQSYLLAVEYKVKKKTIKKLLRVPTMYVKLYGDDLNTIAKLMIDDEMATDIKVLRKIYLNQKIKYNGCYYLIYTKNEFVNKYKMAYQNYIDNDALVYLNKCLKKTDELDDKDKTEQEIIVNKDGDKLKITKEENLKIFKLIKEQYSKPIYESTPYIAKSKEMPEDAFNNLSIKKQIDTLFNMIKILSRSNEDAKFDKSLNNGSSKYFLKVNTITDDKIYIVNESPSGLFKGKEELI

SEQ ID NO: 895 - protein, 1390 aa, synthetic construct
  REGION 1..1390: note = MG44-510 effector
METIKKFKLGLDIGTNSVGYALLDENNKVVRKNGHSFWGVRMFEESSDAKSRRNYRSNRRRLQRRKQRIVLLQELFNEEIKKVDKNFFIRLNDSFYKVEDKHLHNTYNLFADKNYSDYDFFKQFPTIYHLRKYLMETKQKVDIRFLYLAIAHILKYRGNFLSSGEEFKQSDFSMIRVKFEDINSTLVDLSQNFSENENYDEEYFERIDINQNNFFDDLKKCMVEEKGLNNKKKKLLTLFNVGKKTLVNEFVIPLLAGSTINLSNISIIKNEKYEKVEVSLDSEDLEAKQNDACTIIKELSPILCKIELLKEVFDYYYVLKILKGVPTISDAMVKIYDNHQQDLIRLKKLIKKYKPEIYSKMFRELVEEDKEKKKNKIIMNYPRYVGYNKVGVYSFSDKQTERFGHASRQDFYKFIKEQLAKITDESAQDEIKYFLDKIDNDDFLLKQKSNKNGALPMQLHLAELKMILNNQKENYPFLNEKDSDGLTISDKIISIFKFKIPYYVGPLNIKSDFAWIERNNEKIYPWNFEKVVDLDQSAIKFIERMQNKCTYLKGENDYCLPKSSIIFSEYNCLSYLNKLRINGEYISNTLKEKIYNELFLNIEKKQPTRKDLKEFIEANYGDNALVVNIKEIPEINCNMASYIDMKRIFGNDFDKYKDIYENIIKDITVFEDKAALEKRLSTYNLPKEIIKRLKGLNYNKYSSLSGRLLNGITIFNPKTGEVQGTVLEIMRKTNLNLQEILYLEDYKLIDIIDKENKKNESIDDKKIEEYLDEYVNISPLYKRPLIQSYRIIKEIETIFNRPIDEYYIECTRTSKAPKKQSSSRYETLKELYKNCEKDALSMNIDMKELEKNLDECKDSLKSDILYLYFTQLGRCMYTLEPIDISELKNNKKYDIDHIYPQAIIKDDSLSNRVLVDKTKNNKKSDIFLYESDVLNPNAYSFFKKLYDMRLISKEKYNRLIEKEIPESKLDSFVNRQLVTTNQAVTGLIQVLKEYHNVNPINIVYSKSENVTDFRKKFDLVKSRTANNFHHAHDAYLNVVVGGIIHKYFSYRHFNNKYKDIIRMKNERQTLNVDKLLDRDIVKNGEKIIWNKNEMIKQIKHDLYQRFDISETTRTYNSNELFPKVKILPASKDKLVPVKSSNAKSLTQKYGGLKSDSFYKYIIIETNEKNKKKIALEAMPKSAEKDLDGYLKSKGYSNYSIINDNIKINTCAMLEDRKFFITGKTKGGYLLKNAFDRFFSYEDMKIIKKIDKYLDNKSKKVDMNISDDKIIISPARSEKNKEIVLTLQETNKLLDDIFNMYSKKIYSYNIIKTIVEKIKSHDELDFYNKIALCNSLLNLLKTNEQNDTDLTMIGMANRSGTLTISKNLPIGTKLIEESYTGYYKKVIYEVK

SEQ ID NO: 896 - protein, 1398 aa, synthetic construct
  REGION 1..1398: note = MG44-511 effector
MENKYYVGIDLGTSSVGWAATDENYNFLRLKGKTAWGARLFDGANTCQKRRERRSKRRRMARRKYRLLLLNQLFAEEMAKVDKTFFLRLANSTYWAEDKAKDDKGNDLGKNIIFKTWKEESEFYNNYKTIWHLRNELVKNNDNAFSDLRLVYLAIHHIIKYRGNFLTEGDNFNEKPTVELIRELNSILSKLDEENSNDFLLDDEESIIEDENNKYISEDKLDKLLEILKSDEYKSKKEKQNDIDKLFVKNRSQLIKKYIDMYKVLVTGGSFKISRIDKELGDLEIDFNNGFDGNLDEIKSKLGNAIDLVFNAKKIHDYNSLSKLFGDKNANKNLSQIMVDVYDNHKKDLRNLKKVIRSIDVKLDKKGKESLYYSIFRPIKLTKEDNKRDENNKKTKKSQTPNYASFVQGDDINFKYVTLEKLNDNLKEVLEKNKQYIDDEETYIDLHDKAEKGILLQKPANVSTSLIPHQSHLQELKIILKNASDRYPFIKEIEDKIIKLFMFKVPYYYGPLSTSKSHPYAWVETKEEGTKITPWNMYDVVDEEKTRNKFMKRLINSCSYLDGEPVLPKVSLCYEEYLVLDSLNKMMLNGQFLSPSVKESVLKYILSRSKTTIGNIKTFLKKENELYQNELKDDDISISNIKSDIIFNASSHALLSKYFDLEKDKEMVESLILLATIYAGDSKSLIEAINSNKNYKELTKEQVNAISKLPTNKWGRLSKTFLCGGKDGEMYWVDESIGRCCSILEIMQETNKNLQEVLFDKTYRFQDKINKFNADLRGNKTVKDQIDDIYDEMPSVFVRSVTQTIAVLDDVVRAAKCAPNKIYIEVTRADQEKKETKSRYDALKEVIKKELKDEADRRDSLLEKLEYANNSRKLRSINVYLYFLQLGIDFYTGEPIKDLNDVINGIYDKDHIVPQSLRPDDSIDNLVLVNKDYNEKVKRDIYPIVAPIRNEKTLKLWKSYHKRKLISDKKYNSLIRTTELTYEEINDFVNSQINVVNFSNVQLKRILELKYPDTKVCFTKAIYASSLRQKLSIAKMRDLNDSHHAVDAYLNIVGGDILSNLYTDVFYLYDEKKNKKKNVSFDMEKRLHNYIEDNNLKDKIRTNCFRHDALITYKPKFSTSKKAGDLYKETIFEKADKDSVNLIPCHTKGPMKDTKKYGGYSQINQSYILAVEYTSGKKTVKKLLRVPTMYLNLYGNNEEELLKLIVNDEKAKDIKILRKIYINQKIKYNGCYYRIFTKGKNNIYKMAYQNYIDNNIVLYLNKSLKLSDDLIDKTIDSQTFIINNKGEKFIISKEKNKIIFDTIKERMFNKRYDECSYFEKAREMKFEIFNNLSLKEQISTLINMLKLLSCSTESVNINAEFKVEKRLLFVNSPDITKEEIYIVNESPSGLFKGKEELI

SEQ ID NO: 897 - protein, 1383 aa, synthetic construct
  REGION 1..1383: note = MG44-512 effector
MAKQKILCGLDIGTNSVGWCVTDENNKVIKKQGKSLWGVRMFEEAKEAKERRGFRSSRRRLKRRKERLSLLQSLFSIPMNEVDASFFYRLSNSFYHNEDREHPFQYTLFNSVNYTDKQYYDEFPTIYHLRKHLLESKEKEDLRFIYLALHHMIKYRGNFLSEGTSFKPLDKESADSDFRALQALIEEESRFEGENISYDDNIFEELKIANKNIKRLGDLQDRFNELLNPLKNGFIKSNIIPLMLGKKIKIKNLKLEDSEEKLELKEVCPADENYEDNIQLILASYPEEENLVEILLLLQKIYQFFLLGKLLGDHQYLCNAMVERYEKHHNDLKQLKAYIRKYHNEDYGRLFRKPRKKGEKEEANYSSYVGSYIVNGEEPCRFGRGGKQEEFFKLIKSILAQDNNQEAKDIIQSIDNKDYLPLLNSTSNGVFPYQLNLLEMKVILENQSKHYEFLNERDEDGTIAEKIISLLTFKIPYYVGPLSSKANHSWIVRKEGKIYPWNFYRMVKKDDTAAEFIKRMLNRCSYLPSEYCLPKDSLIFTYYNVLSFLNKLQVNGKYLGYEEKMELISLFKTKRKVNVKEIENFFKHKNPGTEVSITTSNGKGLSNIACNMSSYYDFANIYSPEYVDSHTDEIEAIIQDIVIFEDKQILEERLKNTHGIKDISIIKKIKGLNYTKYGRLSKELLVGLKAANQETGELYGSILHIMEHSNMNLQEIIHAEEFNFQALIDDYNQAHSSGDKKDTIEGYVDTLYVNPGMRRGLIQAYKIIEELEKILKRPIDEFYVECARTNKEKKQPSSSRKQKLITLYNEAIKATKDAQELKRLLDHLENMDENQFQSDKFYLYFLQMGRCMYSGDPIEIESLFDTSKYDIDHIIPQSLTKDDSFNNRVLVKQELNRDKKAIYPIESSLLFHGNRDKAFAFYRHLKDMGLMSEDKFEKLRRTQPLKDEEYAAFANRQLVYTNQAVAGLISAIQYFKRDSGHMPRIIYSKAENVSDFRKVFELVKSRTANNFHHAHDAYLNIIVGRTLDSYFSPFKQNKDTIHQMHLEKKTTNPLKVFTADYKVFDLSGNLVWDKEKSLQEIRHQLYECYDILTTTRTFYRNGLFSKETIYKKGKKGSNIGVKENGPLSSTQKYGGLDSYIYGSFALIKSSKDVVLEGIPNIFKYQIEEYLASKYPNFELLIPSLKINTVILQDNKKYCVTGKGDERILLCNLFERRFRYEELLIIHKLDKLQKKIKGFSGNETDEDLQKFGLILKETSIIISIAKNKDVKQIEISNDECNKLYDAIQKIFEKPIYTYSTVIQIVSLMNEQKDYFKNLTLIAKSKVLLNLLDLLKCNESKRIDLTLLHGSKTMGILRISKKLKNCKIIVESYTGFYTKVIWEIK

SEQ ID NO: 898 - protein, 1393 aa, synthetic construct
  REGION 1..1393: note = MG44-513 effector
MKNNEETLKKLRLGLDIGTNSVGYALLDENNKLIKKNGHTFWGVRMFDEAETAKDRGSYRKSRRRLLRRKERMEILRSFFTKEICDIDPTFFERLDDSFYYKEDKKNKNTYNLFTSEYTDKDFYLEYPTIYHLRKAMQEEDKKFDIRMVYLAIAHIIKYRGNFLYPGEEFSTSEYTSIKQFFLDFNDILDELSNELEDNEDYSAEYFDKIENINDDFLEKLKVILMEIKGISNKKKELLDLFNVNKKSIYNELVIPFISGSAKVNISSLSVIKNSKYPKTEISLGSEELEGQVEEAISVAPEIKSVLEMIIKIKEISDFYFINKILSDSKTISESMVKMYDEHNEDLKKLKGFFKKYAEDQYNEIFKIRDEKLANYVAYVGFNKLRKNKVERFKHASREEFYGYLKQKLNNIKYVEAQEEIKYFIDKIDNNEFLLKQNSNQNGAFPMQLHLKELKTILNNQEKYYPFLSEGNDGYSIKEKIILTFKYKIPYYVGPLNKESKYSWVVREDEKIYPWNFDKVVKLDETAEKFILRMQNKCTYLKGDNDYCLPKNSLIFSEYSCLSYLNKLSINGKPIDPIMKSKIFNEVFLIKKQPTKKDIIEFIKTNYNADALTTTEKELPEATCNMASYIKMKEIFGKDFNDNKEMIENIIKDITIFEDKSILGNRLKELYKLNNDRIKQIKGLNYKGYSRLSKNLLVGLQIVDNQTGEIKGNVIEVMRKTNLNLQEILYLDGYRLIDAIDEYNRKNSLNDSYLCARDYIAENLVISPSFKRALIQTCSIIQEIERIFHKKIDEFYVEVTRTNKDKNKGKTTSSRYDKIKKIYSSCQELAMAYNFDMKRLKNELESNKDNLKSDILYFYFTQLGKCMYSLEDIDISDLTNNYHYDIDHIYPQSIIKDDSLSNRVLVDKKKNAAKTDKFLFEAKVLNPKAQQFYKKLLSLELISKEKYRRLTQKEISKDELEGFVNRQLVSTNQSVMGLIKLLKEYYKVDEKNIIYSKGENVSDFRHTFDLVKSRTANNFHHAHDAYLNVVVGGILNKYYTSRRFYQFSDIARIENEGESLNPSRIFTKRDILKANGKVIWDKKEDIKRIEKDLYHRFDITETIRTYNPNKMYSKVTILPKGEGESAVPFQTTTPRVDVEKYGGITSNKFSRYVIIEAHGKKGLDTILEAIPKTACGDNNKIEKDIDNYIASLDEYQKYTSYKVVNYNIKANVVIQEGSFKYIITGKSGNQYVLQNVQDRFFSKKAMITIKNIDKYLNNKKLGIIMAKDNEKIIVSPARGKNNEEIFLGKTELVNLLKEIKTMYSKDIYSFSAIQNIVNNIDCSIDYSIDDFIIICNNLLQILKTNERKNADLRLIHLSGNSGTLYLGKKLKSGMKFIWQSITGYYEEILYEVK

SEQ ID NO: 899 - protein, 664 aa, synthetic construct
  REGION 1..664: note = MG44-514 effector
MYYTDENGVMYTILGLLEETNQNLQEIVNSGKYGFDEKIKEFNDALTKDETIDEQISKILEGTPALMVRSITQTIKVVDDVIKAAKCEPKKIIMEVTRTDEKKGQEVASRYIQLKKKISEDKEIDDKEKEGLLSDLEEANKTKKLKGKHLYLYFSQLGIDLYTGKKMKIEEVLEGKYDIDHIVPQSLIKDDSLDNQVLVNKKYNQDVKKDIYPICDEIRSKMLNLWYNYKERGIIKEEKYNRLIRTTELTDDEINDFVKRQINVVNYSNVQIKRIFELKYPDTEIIFSKAGFPSLLRKEYEIAKMRDLNDAHHAVDAYLNIVCGDILTSLYTDVFYLIKRKKEKKEKPTFNMERRLLGYIKKNDLMDKIKSNCLRHDALITFKPDYDSGMFYKQTIFKKSGDKETGLIPLHTKGPMSDVKKYGGYSSLSQSYLLAVEYKVKKKTIKKLLRVPTMYVKLYGDDLNTIAKLIVDDEKAIDIKVLRKIYLNQKIKYNWCYYLIYTNNEIQNKYKMAYQNYIDNDALVYLNKCLKKIDELDDKDKIEQEIIVNKDGDKLKITKEENLKIFKLIKEQYSKPIYESTPYIVKSKEMPEDAFSNLSLKNQIDTLFNMIKILSRSNEDAKFDESLKNSGTKYYRVSNNITNLDTYIVNESPSGLFKGKEELI

SEQ ID NO: 900 - protein, 671 aa, synthetic construct
  REGION 1..671: note = MG44-515 effector
MEKKYYIGLDLGTSSVGWAATDENYNFLRLKGKTAWGARIFSEAVDCKERRSFRSNKRRVARRKYRLLLLKNLFAEEMAKVDKTFFLRLENSTYWAEDKAKDDEGNDLGKTLIFKTTEEEREFHKAYPTTWHLRKKLVDNDEQALSDLRLVYLAIHHIMKYRGNFLSDGTKDNEEPSKDTIDRINVILNLLEAKDNESGISDNITYLSKESYSELIETLEDKNLNKTKKQDKIKKLFKNVDKTNEYIKVYIDLFKTLVTGGVFSVKKINEEYDKLKIDFNNGFEDTADEISKALGDAYELVLIAKAYNDYISLKDLLGGKQYLSYVMADIYDEHKKDLKSLKKILVSIDYKLGNEGNNRVYNLVFKPVIVPKEERKDKDGKKNKKLTTPNYASFIQGDDVEKKSVTLENLNKNIKEILEANKQYVDEADKEEFDRLLDKASNNELFKKQATVSTSLIPHQCHLKELNKILENAGKKYPFIKENSDKIIQLFKFRVPYYYGPLNNESKEHAWIVKNEGKERTKITPWNIDEVVDRGRTREGFFKKLTNSCTYLVGETVLPKVSLVYEKYLALERLNKMQVNGNYLNHKDKIDLLNYILGNSNTTIENIRKKLASDTGMKINDIVISNIKNNVPFTATSHAFFRKHFNLENTKEFELCEDVIKYATIYADDKK

SEQ ID NO: 901 - protein, 735 aa, synthetic construct
  REGION 1..735: note = MG44-516 effector
FVDKDLSENGGVCENIILWHTLNTDKNIVVDLIKENYGKIPEIKNAIKQLKGLVFHDFGRLSRKLLCEIYTVKEDTGELWNVLDALYETNENLNELLNDEKFSFGRNIKEENGEMTSDVGYKDVEELYVSPAVRRGIWQTLTVVDEYVKAIGKEPDKIFVEVTREDGIKGDAGRTQSRKRRLQEKFRTVSDAYADVIAELGEERFTDLKLRQERLFLYFRQLGRCMYTGERIDLNNINDVTRYDVDHILPRTFIKDDSLDNKVLVLRSKNAKKSDTYPLPAGFSNQRDFWKMLLDKGLIAKVTYDRLTRTEPLREDEYQDFINRQKVITDQTVKIVAELFKRRYPTAKIVYSKAKNVNDFKQKFDLFKCRETNDLHHARDAYLNVVVGNVYDTVFTTPMSMYRKDGDVWRTYNLNKLFTRDVKGAWDNAQSIATVKKVYSKNSMVVTRYATCNNGGFYDQTIYGKEEKGITAPRKGKGSLSDSSKYGGYMTQPTAYFAVVSSKDKNGNEIKTIEAVPVLTAYMAKNDPKAVERYFSERLKDAKIIVPKIKIKQLVSYNGTQCYLAGTTGKQILVHNAVQLFTDGKTDEYVNSLLKLADMKTKGVINVGQEEFVMKTNRDGERKLVIDRANNADLYGMLKRKLERENYAGLSAFATFRKNLEKGEEKFNSLTVYEQTVVLLQILKFFKCNAETADISSIGGGKIVGKIYVNINITNVDFRLIDLSPAGLTERVRKV

SEQ ID NO: 902 - protein, 1420 aa, synthetic construct; identical to SEQ ID NO: 41
  REGION 1..1420: note = MG44-517 effector

SEQ ID NO: 903 - protein, 1398 aa, synthetic construct
  REGION 1..1398: note = MG44-518 effector
MENKYYVGIDLGTSSVGWAATDENYNFLRLKGKTAWGARLFDGANTCQKRRERRSKRRRMARRKYRLLLLNQLFAEEMAKVDKTFFLRLANSTYWAEDKAKDDKGNDLGKNIIFKTWKEESEFYNNYKTIWHLRNELVKNNDNAFSDLRLVYLAIHHIIKYRGNFLTEGDNFNEKPTVELIRELNSILSKLDEENSNDFLLDDEESIIEDENNKYISEDKLDKLLEILKSDEYKSKKEKQNDIDKLFVKNRSQLIKKYIDMYKVLVTGGSFKISRIDKELGDLEIDFNNGFDENLDEIKSKLGNAIDLVFNAKKIHDYNSLSKLFGDKNANKNLSQIMVDVYDNHKKDLRNLKKVIRSIDVKLDKKGKESLYYSIFRPIKLTKEDNKRDENNKKTKKSQTPNYASFVQGDDINFKYVTLEKLNDNLKEVLEKNKQYIDDEETYIDLHDKAEKGILLQKPANVSTSLIPHQSHLQELKIILKNASDRYPFIKEIEDKIIKLFMFKVPYYYGPLSTSKSHPYAWVETKEEGTKITPWNMYDVVDEEKTRNKFMKRLINSCSYLDGEPVLPKVSLCYEEYLVLDSLNKMMLNGQFLSPSVKESVLKYILSRSKTTIGNIKTFLKKENELYQNELKDDDISISNIKSDIIFNASSHALLSKYFDLEKDKEMVESLILLATIYAGDSKSLIEAINSNKNYKELTKEQVNAISKLPTNKWGRLSKTFLCGGKDGEMYWVDESIGRCCSILEIMQETNKNLQEVLFDKTYRFQDKINKFNADLRGNKTVKDQIDDIYDEMPSVFVRSVTQTIAVLDDVVRAAKCAPNKIYIEVTRADQEKKETKSRYDALKEVIKKELKDEADRRDSLLEKLEYANNSRKLRSINVYLYFLQLGIDFYTGEPIKDLNDVINGIYDKDHIVPQSLRPDDSIDNLVLVNKDYNEKVKRDIYPIVAPIRNEKTLKLWKSYHKRKLISDKKYNSLIRTTELTYEEINDFVNSQINVVNFSNVQLKRILELKYPDTKVCFTKAIYASSLRQKLSIAKMRDLNDSHHAVDAYLNIVGGDILSNLYTDVFYLYDEKKNKKKNVSFDMEKRLHNYIEDNNLKDKIRTNCFRHDALITYKPKFSTSKKAGDLYKETIFEKADKDSVNLIPCHTKGPMKDTKKYGGYSQINQSYILAVEYTSGKKTVKKLLRVPTMYLNLYGNNEEELLKLIVNDEKAKDIKILRKIYINQKIKYNGCYYRIFTKGKNNIYKMAYQNYIDNKIVLYLNKSLKLSDDLIDKTIDSQTFIINNKGEKFIISKEKNKIIFDTIKERMFNKRYDECSYFEKAREMKFEIFNNLSLKEQISTLINMLKLLSCSTESVNINAEFKVEKRLLFVNSPDITKEEIYIVNESPSGLFKGKEELI

SEQ ID NO: 904 - protein, 1378 aa, synthetic construct
  REGION 1..1378: note = MG44-519 effector
MEKKYYIGLDLGTSSVGWAATDENYNFLRLKGKTAWGARIFSEAVDCKGRRSFRSSKRRVARRKYRLLLLKNLFAEEMAKVDKTFFLRLENSTYWAEDKAKDSEGNDLGKTLIFKTTEEEREFHKAYPTTWHLRKKLVDNDEQALSDLRLVYLAIHHIMKYRGNFLSDGTKDNEEPSKDTIDRINVILNLLEAKDNESGISDNITYLSKESYNELIETLEDKNLNKTKKQDKIKKLFKNVDKTNEDIKVYIDLFKTLVTGGVFSVKKINEEYDKLKIDFNNGFDDNADEISKALGDAYELVLIAKAYNDYISLKDLLGGKPYLSYVMADIYDEHKKDLKSLKKILVSIDYKLGNEGSNRVYNLVFKPVIVPKEERKDKDGKKNKKLTTPNYASFIQGDDVEKKSVTLENLNKNIKEILEANKQYVDEKDKEEFDRLLDKASNNELFKKQATVSTSLIPHQCHLEELNKILENAGKKYPFIKENSDKIIQLFKFRVPYYYGPLNNESKEHAWIVKNEGKERTKITPWNIDEVVNKEKTREGFFKKLTNSCTYLVGETVLPKVSLVYEKYLALERLNKMQVNGNYLNHSDKMDLLNYVLGNSNTTIENIRKKLASDTGMKINDIVISNIKNNVPFTATSHAFFRKRFNLENSKEFELCEEVIKYATIYADDKKELKKFLSENFSFDEKLIKEIANLQTNKWGRLSKKFLCGGAKDEMYYTDENGVMYTILGLLEETNQNLQEIVNSGKYGFDEKIKEFNDALTKDETIDEQISKILDGTPALMVRSITQTIKVVDDVIKAAKCEPKKIIMEVTRTDEKKGQEVASRYIQLKKKISEDKGIDDKEREELLSDLEEANKTKKLKGKHLYLYFSQLGIDLYTGKKMKIEEVLEGKYDIDHIVPQSLIKDDSLDNQVLVNKKYNQDVKKDIYPICDEIRSKMLNLWYNYKERGIIKEEKYNRLIRTTDLTDDEINDFVKRQINVVNYSNIQIKRIFELKYPDTEIIFSKAGFPSLLRKEYEIAKMRDLNDAHHAVDAYLNIVCGDILTSLYTDVFYLIKRKKEKKENPTFNMERRLLGYIKKNDLMDKIKSNCLRHDALITFKPDYDSGMFYKQTIFKKSGDKETGLIPLHTKGPMSDVKKYGGYSSLSQSYLLAVEYKVKKKTIKKLLRAPTMYVKLYGDDLNTIAKLMIDDEMATDIKVLRKIYLNQKIKYNGCYYLIYTKNEFVNKYKMAYQNYIDNDALVYLNKCLKKTDELDDKDKTEQEIIVNKDGDKLKITKEENLKIFKLIKEQYSKQIYESTPYIAKSKEMPEDAFNNLSIKKQIDTLFNMIKILSRSNEDAKFDKSLNNGSSKYFLKVNTITDDKIYIVNESPSGLFKGKEELI

SEQ ID NO: 905 - protein, 1397 aa, synthetic construct
  REGION 1..1397: note = MG44-520 effector
MKKNKVLMGLDLGTDSVGWCVTDENGKIIKKNGHHLWGYRGFSEAQDASNRRASRSLRRRYNRRQERIALLRNIFNEEIAKVDSSFFYRLDNSFYFNEDRKVPYDYTLFNSKTYNDSQYYREFPTIYHLRKHLIYSKEKADIRFIYLAFHHMIKYRGNFLNNMEEFHVLDQSEIMEYFAELNENIINSTNEEEDFLINGLSFNADVFASLKEINETTRGISLLKEKYNELLNPENDSYLKNVIIPLMVGGNVKVGKLGLENIENKEKDDLCAKNENFDQIINDLLVENSSQERLINCFICCKQIYEFFLIGKLLGKHKYLSDAMVERYNTHHEQLKKLKRYVKSNCPDKYDLIFRENSSNINNYVAYVGSTIVNGKKQTRGHVSSVEFYTFLKKTLNIEKYLGDDEYIKEILSLMDNEEYLLRQNSSNNGVFPYQLNKLEMKIIIENQAKYYPFFKEITEGISNSDKIISILEYKIPYYVGPLMKPNNTDRSKFSWIVRTNDKIYPWNFNEVVDLEESSKQFIYKMLNKCTYLPSCYCLPKNSLLFSYFNTLNHLNKMHINGSYIRPQEKMMLIKELYLIKRKVSKKDIIQYFNCKGIKNVEITTSNNKEKDDFKFDMSSYVDFVSIFGTEYVKEHFDLIENIIRDITIFEDKSVLAKRLKKEYGIEDEIIIKKIKGLTYSKYASISKELLMDIKYDHIDSSTGEILDSMSILSIMEKTNKNFQEVLFDEKYNFGEIIRRFNSNSLSNNYDSIEEYVSDLGCIAPGMKRPLIQAYKICDEVEKILGQRIDEYYIECARTNKAEKKIKQKSRKEKLLSMYDEAMKMASATLKEELKGKIETIKSMQDNVFRSDKYYLYFSQMCKCMYTGNPIDISDLNDDSKYNIDHIIPQSLIKDDSFDNRVLVETHANEQKAASYPIPQSILWNGNSEKARAYYKALLELKMISPEKYRRLTALELTESDLESFVNRQLVYTNQAVKGLSNAIRELKTKGEFEPKIVYSKGENVSDFRKRYGILKSRNVNNFHHAHDAYLNILVGRTIDTYFRRYQSQYGYTEYLTWMHDNGLTTNVNNIFENSKEGKKDLFDGSGLVWSYKNDKSLKEVLYNIYNNFDIFSTERTYKGNELFGKMTVYPAGKGNIPVKDNGILSNTSRYGGLKEYAFGFYSIIDYKGEYILEAIPTVFNKCVNKYLSTKYDDYKVIIEKLNINTVFYIGKKKFVITGKSGDRYVLKNKNERIFNKKEIYIVRKIEKLLELYNSKEYKEEIDNSLKLNTNEVVISKARTNKNKSIILTKQELLYLYDSLLSMYSKDIYSYSSSVSIVNLMKESKEEFDKLDLIPEVMLLNSLLDYLKTNTRKIIDLSSIKGAKNSGEIRMSNKLKHCRIVFESYTGYYTKTILEID

SEQ ID NO: 906 - protein, 1502 aa, synthetic construct
  REGION 1..1502: note = MG44-521 effector
MSLEKGYYVGLDVGSGTCGWAVVEDTKDSDGKCLFKLARLKGKDAWGAYIFEEGEDCKKRRGFRSARRRNDRRKYRIYQLQKLFAIPISKKDPTFFKRLNQSAYFNDDKSDEIKNTYPLFKNKKDEKEFYKKYPTIFHLREKLVEGDKEAFCDIRNVYLALHHIIKYRGNFLTDEKFSSNSTIDYEKEFDELNQIIRSYYADNTELCNKDVLKKEDYSKAYSIIVSDKTKNDKERELKSLINQDFVDNDCQTEFYMFASLVSGKKFNFEKELGIVDAEKKDFSFDSLKDEDKDNVRDYFGDKAELFDKAYLFFCDAKIKKLIHYSKEGCVSPLSTSMKMLYEIHKMDLKYVKKMLKEIDSKENGKNYYDDFFVNENLKDNYPAYIHSSAAVKEKKASTSDGINKNIKNILKTNIEYIDDSTIDEYLKERKELIIELEYDKNSIKSSFISLLDNEKTELFPLISIYSTSVIPHQLHEIELDAILENCKRFYPELYVKTSQDEFDFAKKVKTIFLFKIPYYYGPIKNDLKNENKYSNIERKDEYKDEKITMFNIKDVVDEGKTKENFIKKLINNCKYLDAEKVISKSSLLYQEYMIRDRLNALQVNGEYLKGEEREELFNYIHRRSKTTVEDIKKELKDRLKMDESSINISGINASNPFVSSSYYCAYRLYNQPIENDSSLYKKVEEIIELCTIYSDDKSELKKVLLNDKHLTQEEMKEFLKLKTDSWSPFSKKLLNGIKSEGEEKTIIEYMRDPLQHLNFQQVYFKYHFDKIVERINSEHSSEDPLNKKIEEIIDRVPPKFRKSINSSLKILDDIVKANDGVAPKTIYLEVTREDKAEKKNKESVSRVDKIKKLYSDEDSRKGILSMISEEELKELSDLLDDKDISTKIKGEQVYLYFMQLGRDLYDHNTRIDFDELIKGNSYDVDHIVPKSLTPMPDDSLDNKALVSSKINQKVKQDIYPLTLINNGQIIESNKSFWKMLYDKKLMSKKKYDALTRRSEMTDDELCSFMNAQLNVVSYTNTVLKRVFKLKYPESEIDFVKAQFASEIRHFYGIQKLRIQSKHTSFGNTQLHSEIKPFAINLNDAHHAFDAYLNIVCGKTLFERFNSDDRIKGYIKEKRAELRNKNSKDDSEEDKAKRSLNMMNYLIYSIPYSIRINIIKTCLTKHSPLVVYGLMNVGQSLYEQTLNSPKNVKEDSLIPVHTKEGPYNDVSKYGGYTGKSIHSFLLYSYDEKKKKGICRLVPIHVSVYKKYEHIDDKEERYRLISEELISYEENELKEVSNLQLLAHIPLGIKIKYGYNVFQLRPNNKTQYILKNAYQNYLDEEVSFDDLDGLDEKDKFLKMQERTKYSTSRYVYFAVKKFKYLTEDKVNNEEITLVTSKKGNTYTFSKWRNIRIFGNLMKTINSFRFNGVRYIERIRKVNEDGEFFSFSMQDQILTICCLINLLYKESSKESVQYLKDAPSTLYLQPRFTVSDSFTTISESPTGLFRKENTYFIKKEKFLKI

SEQ ID NO: 907 - protein, 1496 aa, synthetic construct
  REGION 1..1496: note = MG44-522 effector
METKETKNNKTRKLIDRTGNDKYYIGLDIGTDSVGWALTDSKYNLQKINNKSTWGVRLFDGAATAKDRRTKRCLRRRLHRRKVRLNYLKSLFAPAINKIDPMFLTRLANSYLYVNEDGTAGTRIDFAQKNNIQLYQKNKRLHLFEGLGITDKEFYSDFPTIYHLRKALLDGKVTKIFKDENGNFNTVTFSPHYDLYDPRLVFLALYSLLKTRGHFLYDADINSYLEGKDLKDKINAIAEGLLLKIDNEVDYENVKKLYQNELIGIKEGEQYKIKTKNDKSKNIKELIKVSDKADESLNLDNKERERLFYDILSGSFGSSIKLKKPKNESESLLAGLENEVKIDFSKQDWDAIDQLIAHIDEGVIESINASFFIFNWSKLNEILAEEKYVCCGKVKTYEKHKKDLMWLKNTVREILKNDSEKENKYNMIFGGIEKGFTYEAYVHHGVKPTKDTRLKSFISHIEKVLGDEFNCKINENNEIKNEIDDDKFLPIERSLDNSNIPNAVIKYEYEEILKKAMENGVDFLTKDDESKYKNDNSGKTPYDKVLSLISFKIPYYVGPLAYNDSKDEQSINSWIVRKPGWENKQIMPWVFDEAVDKGKTRTKFIERMNSSCTYLKGEKALPKKSIYYQKMEVLEELNNMCKNLQIDGNNLDENNAVKIKQYIFHEIFEKGISPTKTKIERVIKKYYRDNFGREVSVDFKLGGEDSSTFKSSLSSYLALKDIPITDEQKEELIALYTIFGQEIKIAKEEAEKNDWYKKLSETDKDSINKSLSKVSGWGRYSKEFLTGITAKEQSTGRYKNILTYLYETNYNIQSLLYENKISEPFGDKIREFNKDDSPKKTIYNVKYEDLDCLYVPVNVKRAVWQSIKIVKELVKAIGCSPTKIFIETTRKEDEKIELKQSRYKKIQDLYKAVKNQADELKKDLENNKDKLSSERLFLYFTQFGKDMYTGESIIDINAVLNGTGYDVDHIYPRSITADDSILANKVLVDQNLNKKKGNKTLKASGIIKDANEVEKLWKFLLDKNFISKEKFRRLVYSLKNDELEDKEIENFANRQLVETSQSTKAVKDMLNNLFNSEDNNATKTEIVFSKAGKVTDFRNINRLYKNRDINDMHHAKDAYLNIVVGNVYNAVFTHGYWKKLVKHIYDEDKKGSKSIHDGIFRWPEIKDDKEIVWEKEKTLALVEKTLYQNDVLLTRMQTTGKGALFDETVYSAKGQTEKLGVTPVKNNDLHYGYYNKQSSAYFCLVSYKAKKDKTEYSIECIPLWFYNKNKQLSKKDIAKQYCELDQNDGGLGLKNVQVIQPYLRLKTLLKYAEDNGYMAGYLSGRTGSRLVFDIADMLKLEAFEPYAIQVCKFVEKRKENKEYTIEEFNYRKKLESEKQITLREIRRPVITDKDNISLYDYLVQVHKKPCFINKPSSQIAMFEKNREKFISLSLEDQVILLYNMIAYFNGDLGDFSLIGGSNNAGVFLKGKKLSSGSLIINQSITGLFENSSTIKE

SEQ ID NO: 908 - protein, 1502 aa, synthetic construct
  REGION 1..1502: note = MG44-523 effector
MSLEKGYYVGLDVGSGTCGWAVVEDTKDSDGKCLFKLARLKGKDAWGAYIFEEGEDCKKRRGFRSARRRNDRRKYRIYQLQKLFAIPISKKDPTFFKRLNQSAYFNDDKSDEIKNTYPLFKNKKDEKEFYKKYPTIFHLREKLVEGDKEAFCDIRNVYLALHHIIKYRGNFLTDEKFSSNSTIDYEKEFDELNQIIRSYYADNTELCNKDVLKKEDYSKAYSIIVSDKTKNDKERELKSLINQDFVDNDCQTEFYMFASLVSGRKFNFEKELGIVDAEKKDFSFDSLKDEDKDNVRDYFGDKADLFDKAYIFFCDAKIKKLIHYSKEGCVSPLSTSMKMLYEIHKVDLKYVKKMLKEIDSKENGKNYYDDFFVNENLKDNYPAYIHSSAAVKEKKASTSDGINKNIKNILKTNIEHIDDSTIDEYLKERKELISELEYDKNSIKSSFVSLLDNEKTELFPLISIYSTSVIPHQLHEIELDAILENCKRFYPELYVKTSQDELDFAKKIKTIFLFKIPYYYGPINNDLKNENQYSNIERKDEYKDKKITMFNIKDVVDEGKTKENFIKKLINNCKYLDAEKVISKSSLLYQEYMIRDRLNALQVNGEYLKGEEREELFNFIYRRSKTTVEDIKKELKDRLKMDESSINISGINASNPFVSSSYYCAYKLYNQPIENDSSLYKKVEEIIELCTIYSDDKSELKKVLLNDKHLTQEEMKEFLKLKTDSWSPFSKKLLNGIKSEGEEKTIIEYMRDPLQHLNFQQVYFKYHFDKIVERINSEHSSEDPLNKKIEEIIDRVPPKFRKSINSSLKILDDIVKANDGVAPKTIYLEVTREDKAEKKNKESVSRVDKIKKLYSDEDSRKGILSMISEEELKELSDLLDDKDISTKIKGEQVYLYFMQLGRDLYDHNTRIDFDELIKGNSYDVDHIVPKSLTPIPDDSLDNKALVSSKINQKVKQDIYPLTLINNGQIIESNKSFWKMLYDKKLMSKKKYDALTRRSEMTDDELCSFMNAQLNVVSYTNTVLKRVFKLKYPESEIDFVKAQFASEIRHFYGIQKLRIQSNKTSFGNTKLHSEIKPFAINLNDAHHAFDAYLNIVCGKTLFERFNSDDRIKGYIKEKRAELRNKNSKDDSEEDKAKRSLNMMNYLIYSIPYSIRINIIKTCLTKHSPLVVYGLMNVGQSLYDQTLNSPKNVKEDSLIPVHTKEGPYNDVSKYGGYTGKSIHSFLLYSYDEKNKKGICRLVPIHVSVYKKYEHIDDKEERYRLISEELISSDENKLKEVTNLQLLAHIPLGIKIKYGDNVFQLRSLNKIQYVLKNAYQNYLDEEVSFDDLDGLDEKDKFLKMQERTKYSTSRYVYFAVKKFKYLTEDKVNNEEITLVTSKKGNTYTFSKWRNIRIFGNLMKTINSFRFNGVRYIERIRKVNEDGEFFSFSMQDQILTICCLINLLYKESSKESVQYLQDAPSTPYLQPGFTVSESFTTISESPTGLFRKEKTYFIKKEKFLKI

SEQ ID NO: 909 - protein, 1519 aa, synthetic construct
  REGION 1..1519: note = MG44-524 effector
MDNKADGHSRKLVERTGNNNYFIGLDIGTNSVGWALTDDNYNLQKVNGKSTWGVRLFDEAVTAKDRRTKRSLRRRLHRRRVRLNYLRELFRPAIEQIDSEFFKRLENSYLYINDDKQTGTRVDFAAKNNAKLYGESKRFHLFEGQGITDREYYSDFPTIYHLRKALIDEKITKCITTSDGELKNIEYTPHYNLYDPRLVYLALSGHLKNRGHFLYDIPNVKQYLLGGDNLKTNINNIANALYLSISGDPDYSDVTKLFKNELEETVTGSERAYKIQSKKDKLRKIKEIIKVEDDEDWPEYDFKEKSDLFYKIISLAFGSTVTFKKPKESDSSFLDKIEEDVKIDFNSENIESEMQNIISVSEELGKAVKNAYEIYVWATLHESLQGEMFVCMGKVKVYNTHKEDLLWLKSTVRDILKDDADKDEKYGKIFGSVDNGFTYEAYVHHGIKLTKDTRLASFIDHIEKVIGNGNVNGESHNVFKMRCDLEENKDINSRIKDGTFLPVERSSKNSTIPNVIIKAEYDAILEKAAKIGLTFLTEQDKSNFKNDGSDKTPKDKIASLVCFRIPYYVGPLAYAGSIDEYSVNKWLVRNIGYENREIMPWIFDAAINKGETRKKFIERMVSDCTYLKGCKALPKSSLTYQKMTVLEELNNLRYVIKGENLPYEGQIAIQIKQHLYHEIFEKNISASKRNIIKAICDFYRNVCNEDLSASDVDFKIGGEDGTKLKSSLSSYLALKDIPLTDKQKEELIKLYTVFGQEKDIAREEAERYDYYKSLNDEQKNYIHNKLSVSGWGRYSKEFLTTLTVKEPTTNVYWNILSYLWETNYNIQALLYGKNGSESMFRDRVNEYNHSSKEKPDIYNVKYSDLDDLFVPINVKRAIWQSVKIVRELIKVSGCKPKKIFIETTRQDGEREKVVQSRYKQLFDKYNAIKKQTDDINDDIQKLNEELEQYKSRINAENLYLYFMQCGKDMYSGKNIPIKDLLNGVNYDVDHIYPRSLTSDDSIISNKVLVYKDLNHDKGNRTLKASGVIKDKSKVLSIWSNLAEQDFIDKEKLRRLKYSLFHDELEDSEIEDFVKRQLVEASQSSKAVKDILNILLNLSEKDDEKTEIVFSKAKHVSDFRNIYRIYKSRDINDMHHAKDAYLNIVVGNVFNAVFTHSYWKQIKTSLDDESKKTKNVSDGIFAWKCIKDGDKVVWQGEESRRFVEKTMRREDVLLTRMQTTGKGALFDETVYSAKGERDKDGVIPVKNNDIHYGYYNKMSSSFFALIEYQAKKSKKEMSIESIPLWFYKKNAQLSKKYIVKKFAELPKNKGGLGLKAVKVLSPFLRVKTLLTATKNDGFIKGYISAKHSESTLLLKSADMLKFGEFEPYAIQVCKYIERKKEKKELTVEEFNYRKELTSDKQIWERDVKRPIITKECNIRLYEYLIDVHKKACFINRPASKLGLIEQGRDKFVIMSLELQIEVLYNIIKYLNGDTGDFVHIDGKKGAGRFVLNKNINNETFITNQSVTGLFNNSFTITTEE

SEQ ID NO: 910 - protein, 1184 aa, synthetic construct
  REGION 1..1184: note = MG44-525 effector
KIEEDVKIDFNSENIESEMQNIISVSEELGKAVKNAYEIYVWATLHESLQGEMFVCMGKVKVYNTHKEDLLWLKSTVRDILKDDADKDEKYGKIFGSVDNGFTYEAYVHHGIKLTKDTRLASFIDHIEKVIGNGNVNGESHNVFKMRCDLEENKDINSRIKDGTFLPVERSSKNSTIPNVIIKAEYDAILDKAAKNGLTFLTEQDKSKFKNDGSDKTPKDKIASLVCFRIPYYVGPLAYAGSIDEYSVNKWLVRNIGYENREIMPWIFDAAINKGETRKKFIERMVSDCTYLKGCKALPKSSLTYQKMTVLEELNNLRYVIKGENLPYEGQIAIQIKQHLYHEIFEKNISASKRNIIKAICDFYRNVCNEDLSASDVDFKIGGEDGTKLKSSLSSYLALKDIPLTDKQKEELIKLYTVFGQEKDIAREEAERYDYYKSLNDEQKNYIHNKLSVSGWGRYSKEFLTTLTVKEPTTNVYWNILSYLWETNYNIQALLYGKNGSESMFRDRVNEYNHSSKEKPDIYNVKYSDLDDLFVPINVKRAIWQSVKIVRELIKVSGCKPKKIFIETTRQDGEREKVVQSRYKQLFDKYNAIKKQTDDINDDIQKLNEELEQYKSRINAENLYLYFMQCGKDMYSGKNIPIKDLLNGVNYDVDHIYPRSLTSDDSIISNKVLVYKDLNHDKGNRTLKASGVIKDKSKVLSIWSNLAEQDFIDKEKLRRLKYSLFHDELEDSEIEDFVKRQLVEASQSSKAVKDILNILLNLSEKDDEKTEIVFSKAKHVSDFRNIYRIYKSRDINDMHHAKDAYLNIVVGNVFNAVFTHSYWKQIKTSLDDESKKTKNVSDGIFAWKCIKDGDKVVWQGEESRRFVEKTMRREDVLLTRMQTTGKGALFDETVYSAKGERDKDGVIPVKNNDIHYGYYNKMSSSFFVLIEYQAKKSKKEMSIESIPLWFYKKNAQLSKKYIVKKFAELPKNKGGLGLKAVKVLSPFLRVKTLLTATKNDGFIKGYISAKHSESTLLLKSADMLKFGEFEPYAIQVCKYIERKKEKKELTVEEFNYRKELTSDKQIWERDVKRPIITKECNIRLYEYLIDVHKKACFINRPASKLGLIEQGRDKFVIMSLELQIEVLYNIIKYLNGDTGDFVHIDGKKGAGRFVLNKNINNETFITNQSVTGLFNNSFTITTEE

SEQ ID NO: 911 - protein, 1500 aa, synthetic construct
  REGION 1..1500: note = MG44-526 effector
MSLEKGYYVGLDVGSGTCGWAVVEDTKDSDGKCLFKLARLKGKDAWGAYIFEEGEDCKKRRGFRSARRRNDRRKYRIYQLQKLFAIPISKKDPTFFKRLNQSAYFNDDKSDEIKNTYPLFRNKKDEKEFYKKYPTIFHLREKLVEGDKEAFCDIRNVYLALHHIIKYRGNFLTDEKFSSNSTIDYEKEFDELNQIIRSYYADNTELCNKDVLKKEDYSKAYSIIVSDKTKNDKERELKSLINQDFVDNNCQTEFYMFASLVSGKKFNFEKELGIVDAEKKDFSFDSLKDEDKDNVRDYFGNKAELFDKAYLFFCDAKIKKLIHYSKEGCVSPLSTSMKMLYEIHKVDLKYVKKMLKEIDSKENGNNYKDFFVNENLKDNYPAYVHSSAAVKKKASTSDGINKNIKNILKTNIEHIDDSTIDEYLKERKELISELEYDKNNIKSSFISLLDNEKTELFPLISIYSTSVIPHQLHEIELDAILENCKRFYPELYVKTSQDELDFAKKIKTIFLFKIPYYYGPINNDLKNENQYSNIERKDEYKDEKITMFNIKDVVDEGKTKENFIKKLINNCKYLDAEKVISKSSLLYQEYMIRDRLNALQVNGEYLKGEEREELFNFIYRRSKTTVEDIKKELKDRLKMDESSINISGINASNPFVSSSYYCAYRLYNQPIENDSSLYKKVEEIIELCTIYSDDKSELKKVLLNDKHLTQEEMKEFLKLKTDSWSPFSKKLLNGIKSEGEEKTIIEYMRDPLQHLNFQQVYFKYHFDKIVERINSEHSSEDPLNKKIEEIIDRVPPKFRKSINSSLKILDDIVKANDGVAPKTIYLEVTREDKAEKKNKESVSRVDKIKKLYSDEDSRKGILSMISEEELKELSDLLDDKDISTKIKGEQVYLYFMQLGRDLYDHNTRIDFNELIKGNSYDVDHIVPKSLTPIPDDSLDNKALVSSKINQKVKQDIYPLTLINNGQIIESNKSFWKMLYDKKLMSKKKYDALTRRSEMTDDELCSFMNAQLNVVSYTNTVLKRVFKLKYPESEIDFVKAQFASEIRHFYGIQKLRIQSNKTSFGNTQLHSEIKPFAINLNDAHHAFDAYLNIVCGKTLFERFNSDDRIKGYIKEKRAELRNKNSKDDSEEDKAKRSLNMMNYIIYSIPYSTRINIIKTCLTKHSPLVVYGLMNVGQSLYEQTLNSPKNVKEDSLIPVHTKEGPYNDVSKYGGYTGKSIHSFLLYSYDEKKKKGICRLVPVHVSVYKKYEHIDDKEERYRLISEELISYEENKLKEVSNLQLLAHIPLGIKIKYGYNVFQLRPENKTTYVLKNTYQNYLDEEVSFDDLDGLDDKDKFLKMQERTKYSTSRYVYFAVKKFKYLTEDKVNNEEITLVTSKKGNTYTFSKWRNIRIFGNLMKTINSFRFNGVRYIERIRKVNEDGKFFSFSMQDQILTICCLINLLYKESSKESVQYLQDAPSTPYLRPVFTVSDSFTTISESPTGLFRKEKTYFIKKEKFLKI

SEQ ID NO: 912 - protein, 1169 aa, synthetic construct
  REGION 1..1169: note = MG44-527 effector
STSMKMLYEIHKMDLKYVKKMLKEIDSKENGKNYYDDFFVNENLKDNYPAYIHSSAAVKEKKASTSDGINKNIKNILKTNIEYIDDSTIDEYLKERKELIIELEYDKNSIKSSFISLLDNEKTELFPLISIYSTSVIPHQLHEIELDAILENCKRFYPELYVKTSQDEFDFAKKVKTIFLFKIPYYYGPINNDLKNENKYSNIERKDEYKDEKITMFNIKDVVDEGKTKENFIKKLINNCKYLDAEKVISKSSLLYQEYMIRDRLNALQVNGEYLKGEEREELFNYIHRRSKTTVEDIKKELKDRLKMDESSINISGINASNPFVSSSYYCAYKLYNQPIENDSSLYKKVEEIIELCTIYSDDKSELKKVLLNDKHLTQEEMKEFLKLKTDSWSPFSKKLLNGIKSEGEEKTIIEYMRDPLQHLNFQQVYFKYHFDKIVERINSEHSSEDPINKKIEEIIDRVPPKFRKSINSSLKILDDIVKANDGVAPKTIYLEVTREDKAEKKNKESVSRVDKIKKLYSDEDSRKGILSMISEEELKELSDLLDDKDISTKIKGEQVYLYFMQLGRDLYDHNTRIDFDELIKGNSYDVDHIVPKSLTPMPDDSLDNKALVSSKINQKVKQDIYPLTLINNGQIIEANKSFWKMLYDKKLMSKKKYDALTRRSEMTDDELCSFMNAQLNVVSYTNTVLKRVFKLKYPESEINFVKAQFASEIRHFYGIQKLRIQSNKTSFGNTKLHSEIKPFAINLNDAHHAFDAYLNIVCGKTLFERFNSDDRIKGYVKEKRAELKNKNNKDDSEEDKAKRSLNMMNYLIYSIPYSTRINIIKTCLTKHSPLVVYGLMNVGQSLYEQTLNSPKNVKEDSLIPVHTKEGPYNDVSKYGGYTGKSIHSFLLYSYDEKKKKGICRLVPVHVSVYKKYEHIDDKEERYRLISEELISYEENELKEVSNLQLLAHIPLGIKIKYGYNVFQLRPNNKTQYILKNAYQNYLDEEVSFDDLDGLDEKDKFLKMQERTKYSTSRYVYFAVKKFKYLTEDKVNNEEITLVTSKKGNTYTFSKWRNIRIFGNLMKTINSFRFNGVGYIERIRKVNEDGKFFSFSMQDQILTICCLINLLYKESSKESVQYLKDAPSTLYLQPRFTVSDSFTTISESPTGLFRKENTYFIKKEKFLKI

SEQ ID NO: 913 - protein, 1498 aa, synthetic construct
  REGION 1..1498: note = MG44-528 effector
MAKKYFLGLDCGSDSIGYCVTDENYNIIRKKRRVIDGDKTTYYGQHVWGSRLFEEAKDASTRRQNRESRRRLQRRRWRIVLLQECFKEEMNKVDPYFFDRLNNSAIHLEDRKEELRAPHLLFNEVGYTDKEYYKKYPTIYHLRKALISEDRKFDLREIYIALAHMIKYRGNFLLEGDIISTESNIKSLLEHFNAIDEHIEDMNNGLDTDIPQEMFHCTEEQAVKAMECFKKEAKKGSLYDGLVNAFQLTTSNKKTDMRLQIFRLIAGSEIKVGDLFFNRIEDEELAKEKILFADEEKFPALLDKLDDEKKDIILETKALRDLCVLTRLLKGKQYVSDSMIEIYNNHKVQLKELKRLVKKYHKDQYFNFFRNAKDPERKNYVNYVGVNNINNKAIRCSHKTSKEELYKEIKTMFQLDKLDKQDFGYEPADLESLKKIRDSIEAGEYLLRQNARENGVLPYQLNKVEMNAIIENQGKYYPFLLEKAPDFINPHEESYKIISILEFKIPYFVGPLSDKETTKNNWVVKAQKGVKITPWNFHEVIDEDQTAEMFIENLKNYCTYLIDEPTLPKKSLRYSMYEVLNEMNNWCINDNPITEQDKLYLLNNLYFTNKSPKLTDIKQALANKYNVKAKDILLQQKSSEKKEVNAEDIHANLSSYVDMLKPEAFGKKLLSDMEVFEKAEEIIYAITIFEDKKVLQRKLKKMGLDSEHVKYFCKLKYKDWGRLSKKLLDGITDQEETPTGEKYDATILSIMLKKPLNFMEIYATKKKYHFAEKVEEIIKKDTDTIEDRIDKEYVNPTMKRTLRQAIRLIQELKKVLGIEHFDRYFIETTRTKEESKRTSSRKKLLLEAYSSAQSFIKDKAEANRISMLKEKLDEQTDARLQSKKIFLYFMQLGRDVYSGKEIDIDDILTSSGNSKYDIDHIIPQSKVKDDSFLNTVLVSQKANKDKTDTYPIPETILTKEGRDWIKKLNSIKMKNNTSLFMPNEKMKKLLRSTRDQLRPEEIAGFINRQLVSTNQSIKAICDLIRDIDKDATVVYSKANLVSDFRHEFNLIKSRDINNFHHAHDAYLNIVVGNTYNRLFSAGNNKDIDDKLENRIKEKQEKRENLYVDVHHLFTYQNLYLANKICTGQRIWKVKRYERDAEDKRIQDEDGRYVEISSSEGTIDLVRKNLSYNDVLTTRMLKTSVGKSGLFNKISIHKNDGTASFPLKAKGIFASDSYQTKYGGYSDLSNPYSMLVKSEITKGKGKGKAQYSIEFVPQIVLLSYKNKDGSLDLEKVKEYLAQNKQLKNPEIICEKLLKNTILEFPYTSTNGELGKVRLAITGISGNGLTCINQTEPIFDQKHTAIVKKISTILGTNAPAGKKIDLTQYENVTGDLKKNKLTITREETADLFDYITTKIYTKPAFEGIPSIGGTLLKLHDFLEAFKLIPTTITQLHILSTMITLIQSKSVQGNSLRDLAQSLPKSMGMIQPSNVLKPGTKIIQTSISGFYEKVLFTIPEE

SEQ ID NO: 914 - protein, 1385 aa, synthetic construct
  REGION 1..1385: note = MG44-529 effector
MDREKDYFIGLDIGSDSVGWAATDDEFNILRLKGKDAWGARIFDDASDAKERRMRRANKRRINRRKYRIFLLNKLFSSLINPIDDTFFLRLSESTYLLEDRSIKNPYLFLDKGKEKEYYKKFPTIWHLRKALIGNDQYALSDIRFVYLAIHHIIKYRGNFLKEGTIDVNSFDESIFEELNYFFRNLVAEYENCDLDNVDFDLISISQDKEEIIKIFEDKNRNKNDKKKTLKTILNKSINELVNQYKELFISVVVGGSYDLKKLDLGLDSPLSIKFDSSFDEHEAEYKSVLADKYRIIEIAKSIFDHFELKDLLQNEPNLSSAFVDVYERHKYELKALKMVCKDIDEKHNLTGDNSLYLKIFKKADAINYASFVGVNSNQPRTKDIHAFNAELLKALNPYLDEIPDSVIVKIDGKSAPIFIKQELANDNFLNIIANKSTGVIPHQLHLGELEIILNNASKKYPELENIRSKIIQLFKFRVPYYCGPLNDKSKYSSVVRNSNEIVTPWNFDEVINKSESKSKFINSLTNSCRYLLGSTNVLPKASIYYQMFVILDRLNAIQINGVLINKQIKETLLNDLILKNKKTTLSRIKTFLKKKYPIYQQDGVSISGINEKDDFINSTLPIFRQFFNKDVLTNDELKTTERIVYLLTIFKDDISGGISEIKKEYPTLTAHQINLLKSMSFNGWSSLSKDLLVNLKAYDDNGVVHSILSVMYDQILNFQQVLHSNEFKFDQLIANRNKEFTSNKTSEEVQLELIEEMPPKMRRSTIQALRIVDEITSIAGKDPAYIAIEVTREDNNAKTKKKMESISRYKELKAFLSSLVKDKNEIISTQAKEVSKELEDLAKEENNLVKLKGQHLYLYFKQCGFDMYTGEKINFEHIFDNTHYDIDHIIPQCLIKDDSLDNKVLVNKTSNEKDKAERYPLPETIKCEKTIRLWKYLHSKKAISDKKFNNLMRHEPISDEELNNFVNAQINVVNQSNVVLKEVLEKKFENSNTKLIFSKAQYPSYLRQELGIAKLRYLNDAHHGVDAYLNIVTGVSLYQRYTSKYYLKKYEQGDEKSYNFERFLKRQFVLNSDNKIKVIQNASKRDALITFRNIYQDSRFYKQTICKAGDGKLNPIHTKGVMADIDKYGGYNELANAYFVVANINGKKARRTLVSVPHQYDLTYGGEPELLKQKVIELVNHKPNETVEICLDKKIYNNQKILMNGCSYLMGSKGKVINLKPCSPIYLSSDLSLYLKKAEKYLDKLNSSEEIIQIGENRFGNNNQEDNLLFSKDKNISILQKLIELSKNKKYDPNPMIVQIRDFESEEYLTDFKAKTIAEEIKTIIDIIYLFTRNSRQSNIKKNIFGLSTTFIQDKPVVVIHDSITGLISYKEILWYGLQNCYCL

SEQ ID NO: 915 - protein, 1501 aa, synthetic construct
  REGION 1..1501: note = MG44-530 effector
MSLEKGYYVGLDVGSGTCGWAVVEDTKDSDGKCLFKLARLKGKDAWGAYIFEEGEDCKKRRGFRSARRRNDRRKYRIYQLQKLFAIPISKKDSTFFKRLNQSAYFNDDKSDEIKNTYPLFKNKKDEKEFYKKYPTIFHLREKLVEGDKEAFCDIRNVYLALHHIIKYRGNFLTDEKFSSNSTIDYEKEFDELNQIIRSYYADNTELCNKDVLKKEDYSKAYSIIVSDKTKNDKERELKSLLNQDFVDNDCQKEFYMFASLVSGKKFNFEKELGIVDAEKKDFSFDSLKDEDKDNVRDYFGDKAELFDKAYLFFCDAKIKKLIHYSKEGCVSPLSTSMKMLYEIHKVDLKYVKKMLKEIDSKENGNNYKDFFVNENLKDNYPAYVHSSAAVKEKKASTSDGINKNIKNILKTNIEHIDDSTIDEYLKERKELIIELEYDKNSIKSSFISLLDNEKTELFPLISIYSTSVIPHQLHEIELDAILENCKRFYPELYVKTSQDEFDFAKKVKTIFLFKIPYYYGPIKNDLKNENKYSNIERKDEYKDEKITMFNIKDVVDEGKTKENFIKKLINNCKYLDAEKVISKSSLLYQEYMIRDRLNALQVNGEYLKGEEREELFNYIHRRSKTTVEDIKKELKDRLKMDESSINISGINASNPFVSSSYYCAYRLYNQPIENDSSLYKKVEEIIELCTIYSDDKSELKKVLLNDKHLTQEEMKEFLKLKTDSWSPFSKKLLNGIKSEGEEKTIIEYMRDPLQHLNFQQVYFKYHFDKIVERINSEYSSEDPINKKIEEIIDRVPPKFRKSINSSLKILDDIVKANDGVAPKTIYLEVTREDKAEKKNKESVSRVDKIKKLYSDEDSRKGILSMISEEELKELSDLLDDKDISTKIKGEQVYLYFMQLGRDLYDHNTRIDFDELIKGNSYDVDHIVPKSLTPMPDDSLDNKALVSSKINQKVKQDIYPLTLINNGQIIESNKTFWKMLYDKKLMSKKKYDALTRRSEMTDDELCSFMNAQLNVVSYTNTVLKRVFKLKYPESEINFVKAQFASEIRHFYGIQKLRIQSNKTSFGNTQLHSEIKPFAINLNDAHHAFDAYLNIVCGKTLFERFNSDDRIKGYVKEKRAELKNKNNKDDSEEDKAKRSLNMMNYLIYSIPYSTRINIIKTCLTKHSPLVVYGLMNVGQSLYEQTLNSPKNVKEDSLIPVHTKEGPYNDVSKYGGYTGKSIHSFLLYSYDEKKKKGICRLVPIHVSVYKKYEHIDDKEERYRLISEELISYEENELKEVSNLQLLAHIPLGIKIKYGYNVFQLRPNNKTQYILKNAYQNYLDEEVSFDDLDGLDEKDKFLKMQERTEYSTSRYVYFAVKKFKYLTEDKVNNEEIKLVTSKKGNTYTFSKWRNIRIFGNLMKTINSFRFNGVRYIERIRKVNENGEFFSFSMQDQILTICCLINLLYKESSKESVQYLKDAPSTLYLQPRFTVSDSFTTISESPTGLFRKENTYFIKKEKFLKI

SEQ ID NO: 916 - protein, 1347 aa, synthetic construct
  REGION 1..1347: note = MG44-531 effector
MEKEQKFYLGLDIGTNSVGIACTDENYNLLRVKGKDCWAVRLFDEAQTAADRRTARTARRRLQRRRYRINQLQGLFAPFMQDNLFFLRLNNSQFFADDKAGELDGDVNNLFADSGFTDRNFHEKYPTIYHLRFALQRSPVDDIRLYYLALHHIIKYRGHFLYDGNVSEVRDVHKLFDALNTVCENTFAENTPHFDIEKADEAKDMLLRSKGKLKDTVKNIKQLFSVQNDDCGKIRTEIINGFCGAKFSPEKLLGDAYSEEKSFAFKDVEEDAFEAMQSTYGDDFALLKAMREIYNFVTFERLFNGQPNISSAMIAVYDKHKSDLKKLKGFIKKNYDTDGGKKCREMFSDVTQKANYVNYVGHVGYGKSRKRVKTCDYDSFIAYVKKFLMDGNFAHDETYDEIMAEIEAKTFLPKILHSDNGLVPHQVNEDELVKIVAQMVRAFPETAQMASKILPLFLFRIPYYVGPLVGSNSWAVRKSDEKITPWNFRDVVDEAASNEEFMRRMTNKCTYLHGVDVLPKCSIAYQKFNTLNQINKLKVNDCAISVPLKQKIFAELFLVKPRVSDKMIASLIVREGAVAPGDSVVLSGKDGGDIKASMSSYIQLKRILGDFVDYDLASGGNVCENIILWHTLNTDKRLVEDLIVKNYGDNPAVAPYVKQLKGLVFNDFGKLSGRLLTELEVVDKQTGELCTVTDLLWNTNENFNELMFDKRYNLEEVIAAENNDDDGKVDYEDVQKLYVSPAVRRGIWQSLQMVDEYVAALGKEPDKVFVEVSREEGVKGDKGRTHSRKKQLLEKYKNIDPKDVENIDEITGELNSDKISDMRLRQERLYLYFRQLGRCMYSGEPIDLDHINDSKLYDVDHILPRSYIKDDSLDNKVLVLRSKNAEKSDTYPLPLGFTNQQGWWKMLRAKDLISSGTYDRLMRTAPLTDDDYNDFINRQKVITDQTSKAVIELLKRKYPGATLVYSKAVNVADFKSKFDLYKCRETNDLHHARDAYLNVVVGNVYSTVFGVRIETYVKDGEKWKTYNLKKMFTRDVPGAWNENSIRTVKGVYNSSSMCVTRYAYCNKGAFYKQTVYSGNENITAPRKGKGPLANMERYGGYMTQSTACFAIVESQGKKGRIKTIEAVPVMVDYQSRNDPDRVVKYFEENGLVDVKLIVPKIKIKQLVSYNGSWVYLAGVGDVRILVHNATELFVDNKIDDYVNQLLKIVEMAKQPTFNKNSDCYIVKTNRMGDIKLVVDKESNVKLYDELILKLECKRFQGFSAYTSFRNVLIESREKFVGLSTLEQAIVLLEVLKFFKNNADTADLSLIGESKCAGKLRFSKNITDVDFRIISQSPCGLTVHVKRV

SEQ ID NO: 917 - protein, 879 aa, synthetic construct
  REGION 1..879: note = MG44-532 effector
PLTGCNSWVVRTDEKVTPWNFDRVVDLAKSNEAFMRRMTNKCAYIKGEDVLPKASIIYQKYDTLNQLNKLRINDRVISIELKQTIYNELFLKYPKVTDKKIKELLVREGLCSSSETKDITISGKDGDFKSSMSSYIRLKNILGDFVDDDLKSGGKVCENIILWHTLNTDKKIVEDLIEKNYGFIPEIKANIKQLKGLTFNDFGRLSAKLLIGIEGVDKTTGQILTILDVLYQTNQNLNEVLNNESYNFSEIIDEENGIETEIISYETVEELYVSPAVRRGIWQTLLMIDEYVNAVGRQPDKIFIEVTRNDGKKGDNGRTQPRKRQLQEKFKNIGSAYSDIIEELSEEKYTDLKLRQERLYLYFRQLGRCMYTGERIILDELNGNRYDVDHILPRTYVKDDSLDNKVLVCRGANATKADTYPLPTEFSKKEVRAHWKMLLDKDLISKTTYDRLTRIEPLKDDDYNDFINRQKTITDQTSKAVIELLKRKYPDAKLIFSRAKNVSDFKNRFNLFKCRETNDLHHARDAYLNVVVGNVFDTVFSTPLGQSRKDGDVWRIYNLKKLFTRDVIGAWSKDSIKIVKDTYSKPSMSVTRYATCNKGKFYDETVCRKDDSAITAPRKGEGPLSDVTKYGGYTSQKTAYFAIVTSVDKKGKRIKTIEAIPVLVTYKLKTDTNAIQKYLESYLREPVIVIPKVKVKQLVSYNGSLCYLAGITGNQITVHNASQLYTDNDTDEYVNELIKIIGMGDNGMITGNESQYITKTNKDGVIRIVVNKENNEKLYETLKNKLDSKIYKGLSAFASFKTNMERGKDKFCELSVLEQAKVLLQILKVFRCNAKKSNIELIGGGCDSGSIKINKNITDVDFKLVNLSPAGLTVRIRKV

SEQ ID NO: 918 - protein, 1386 aa, synthetic construct
  REGION 1..1386: note = MG44-533 effector
MAKQKILCGLDIGTNSVGWCVTDENNKVIKKQGKSLWGVRMFEEAKDAKERRGFRSSRRRLKRRKERLSLLQSLFSIPMNEVDASFFYRLSNSFYHNEDREHPFQYTLFNSVNYTDKQYYDEFPTIYHLRKHLLESKEKEDLRFIYLALHHMIKYRGNFLSEGTSFKPLDKESADSDFRALQALIKEESRFDGENISYNDTIFEELKIANKNIKRLGDLQDRFNELLNPLKNGFIKSNIIPLMLGKKIKIKNLKLEDSEEKLELKEICPADENYEDNVQLILASYPEEENLVEMLLLLQKIYQFFLLGKLLGEHQYLCNAMVERYEKHHSDLKQLKAYIRKYHNEDYGRLFRKPRKKGEKEEANYSSYVGSYIVNGEEPCRFGRGGKQEEFFKLIKSILAQDNNQEAKDIIQSIDNKDYLPLLNSTSNGVFPYQLNLLEMKVILENQSKYYEFLNERDEDGTIADKIISLLTFKIPYYVGPLSSKASHSWIVRKEGKIYPWNFYRMVKKDDTAAEFIKRMLNRCSYLPSEYCLPKDSLIFTYYNVLSFLNKLQVNGDYLDYEEKMELISLFKTKRKVNVKEIENFFKHKNPGIEVSITTSNGKGLSNIACNMSSYYDFANIYSPEYVDSHTDEIEAIIQDIVIFEDKQILEERLKNTHGIEDISIIKKIKGLNYTKYGRLSKELLVGLKAANQETGELYGCILHIMEHSNMNLQEIIHAEEFNFQALIDDYNQTHSSSEKKDTIEGYVDTLYVNPGMRRGLIQAYKIIEELEKILKRPIDEFYVECSRTNKEKKQPSSSRKQKLITLYNEAIKTTKDAQDLKSLLNHLESMDENQFQSDKFYLYFLQMGRCMYSGDPIDIDSLFDTSKYDIDHIIPQSLIKDDSFNNRVLVKQELNREKTATYPIESSLLFHGNRSKAFAFYQHLKDMGLMSEDKFEKLRRTQPLKDEEYAAFANRQLVYINQAVAGLISAIQYFKRDSGHMPRIIYSKAENVSDFRKAFELVKSRTANNFHHAHDAYLNIVVGRTLDSYFSPFKQNKDTIHQMHLEKKTTNPLKVFTADYKVFDLSGNLVWDKENSLKEIRHQLYERYDILTTTRTYQGTTLFEKVTIYKKGEGNIGVKASGPLANASEYGGLTGYAFGFYTLIKIDRIYILEAIPTLFKNDIKEYLNTLYKEDYEIIVPILNINSVIMEGKKKYCITGKTGNQYLIKNLLERRFTYRELTIIHKLDKIQERLTKNKTSLKGTETEEDLKKLGLYLKENYLIVSIAKNKDAKQIELSYDECSELYDSINNILNKEIYAYSASSTISTLLNEQRDYFEKSSIALKIKVLLNLLNFLKCNERKSVDLTLLAGKSTMGILYLGKKLKPSKIIAESITGFYAKVIWEIK

SEQ ID NO: 919 - protein, 1377 aa, synthetic construct
  REGION 1..1377: note = MG44-534 effector
MSKYYVGLDVGTDSVGWAATDEDYNLLRLKGKDAFGANLFSMASTAKARRLLRTSKRRTARRKYRIQLLNEILAEPISRKDPDFFPRLANSNLHWEDKKGVKGHAVVFPTKKEEAQFYKDFPTIWHLRKALVAGDQKAYKDIRLVYMGIHHIVKYRGNFLKEGDFSVKKFDYETLFDNLNRNIASLREGDNSGPTIAKENYGKAFDIIQERKGTNDKVRALKELLNNPYDSAVWEAFSKLVSGGTFDSSKLVEDATKKINLKKGIADEDYEAALDELKNYGFILEDAKAITDYLSLKQLLGDHTYLCDSMVEIYQKHKSDLRLIKDTLHSVDEKKGQRDKEGSTYFQFFKEKGKDNYLALTHNDSAVRKTPEEVLKFLKGIFEANKDFIDEKTYQTLTDGCCDYSLLPLISVHSTSVIPHQLHHMELKEILRHAANAYPSVFTKEVVEKIDKLFLFRVPYYYGPLNPNSPRSNIVYKAGTDPKEKISPWNYDSLVDEDETRKRFIAKLTKSCMYLIGEPVMPKSSLKYEEFILRDQLNTLHVNGHRFSEEEKEKVFDFLHSRAKTDLPQLKEYLEKLTGIKAAEIVFSGLSEKHEFNSASFAFFERFKAKFHKEISERDAEKIILLSTIYTKEKDDLRKYIRKEYPSFSKNEVNFLLGLNCTKWATVSEKFVDGITGMDENDVAGLTILGYLRTTDRNFQQILNDPKYRFREVIDDENKRHGKDRTDKERIEEILDATPAPFRRSVIRTMAVLDDVVRAKGSAPDKIFIEVTREDNDADTRKAKTKDSRYSELKKMLRSIQKDGKEYSEFVSKNRIDELDSELEEEDIKNAQINGKHVYLYFRQLGYDLYTGEKIDLYDVLHSDRYDTDHIIPQSLIKDDSLDNLVLVDRTYNQRIKQDFYPIPTSIRNEERKKLWHFLHERKLISDKKYNNLIRSTELTEDEINAFVSAQINALNYSNIALRDALATRYPDTKLVFSKAQYPSYIRDQYHISKIRELNNAHHAVDAYLNILCGNILSMTFQNLHVIYAKKKEAAERKASGQEKKENDDKTFNMTHVLRYHLNNDEGLLQRVTFTCMKHSALITYASSDSAGAFYNMNISPVKDTAGELYPIHKGMDPKKYGGYDSTTTSYFYLVSYVKKGKTKKRLLNVKTVEAAECKTDEELKKRLIADNRLNNAEISDIRFLTKIKPNQKVLYHGGIYSLRPSNLFRCNLVNAYQFYLEDSYRYDNDVSYLKFALNHLSLLESDKDSIELFTDRKKEHKIVISKERNYSIFKKLVDLAERKSNGKHPGFESCTFLSNFGKLGSKEEFMKFKPVQQIQIIDEGLKLFTDSIHSKINEYYPSVGKDFAYKPSLNLDGPITLINESPSGLYVRKVTY

SEQ ID NO: 920 - protein, 1420 aa, synthetic construct; identical to SEQ ID NO: 189
  REGION 1..1420: note = MG44-535 effector

SEQ ID NO: 921 - protein, 1481 aa, synthetic construct
  REGION 1..1481: note = MG44-536 effector
MDNKKYKIGLDIGSNSVGWCVTDEDFKIVEKDNKKLWGVLLFEEQQSNQARRANRGARRRIERKRKRILYLQEIFKNEIDKIDPTFFGRLNESFKQKEDKKYKDKYTLFIDKTFNDKTFFKKYPTIYHLQKELMESDSKKDIRLIYLAIANCIKDRGNFLSSKKPENYKVEFSKDETKEKLMSALKELSFYMSDEEKIPYDFDSGTFLSDNFDEILKNNFAKTNNDKKIEYNNIFVDEIKNARTFKNSIFEFAKLVLCGNKITLDKYFKDYIDDKKLEYKVSEEQEIQLNKILEKCKDPDNLIKAINNLESIYQSLQLLNIFKGNVKTLPDALVARFDNYKKDLKNIKEQVKSKFGKDIYYEIFINPKLQKDKNSNGNENNHNYVHYTSSYRNYDVKNKTINKCKLNTSKCSRDEFVDYLKKVLKLEKRTDDNAELYDLVTKEDFLLKPKTHENSIFPYQLKYNVVKTIIEKQKKHYKFFDDVDEDGYKNEDKILSILSFRIPYYYGPLTIDKEKSKWAWISKLEGKENENIRPWNYSDIVDDNKTQETFITKMQNRCTYLKNEYTLPKDSIVFQKYLVYQFLNYVRINGKFFFDADQKEMIISNLFINERKVTNKSFKEYVNTNILKIKATDESDISFKNGAIDDNIPSLSSLYDFIKVYGSYDAVEKNLKTIEEVIRDIAILQDKDILALRLKNKYGFNDNQIKKIKGFNYKNFSPLSYKLLNEITPCDKNGVVIEKTILTLLKECKSSDDQGLCLNRLLELNSNSPSYQYDFKCVITKENGNENCNNIDNFIDDLYVPVSSKRAIKQSCRIIDEIGKILDLNKNYENVSFVVEVTRKKQKNESGKKSKAKETRYKEMSTILNKAFEKDENEQGVIDNFNELKDRDEGIVRSEKYYYYFMQLGKDMYTGETIEYDDLDNYDIDHIIPQSLVKNDSIDNKVLTNKNYNEGVKKNIYPFFNKLDLFRNNGGPTKAKQFWKKLLDNKLISKIKYESLCRTSELCDSELEDFENRQKTTTDQSVIGFINVLKDFYKVEDKNVIYSKASNVSYFRNKFEIYKSRIINNYHHAHDAYLNIIIGSILDNEYKKTFAKYKSINNGESFQQYLEKNKYSVNPEKIIERFFNVDENKELLLSLKNSIFLTKNIFTKQRTYLKGNNIFEKVSLLPKGNFNIPIKNGLACEKYGHYAAYNFAKYCLLRNVNNNGKVNFVLEAIPSLYLDNSEAYLKELYGLDFDNYSIYLDNLKVNTKFKIGEKEFVITGKTNDQYVILNSVERSFAKNNDLCASQKLNKTIHKLEKVYNYANQLTTGDKLKLLNCEKYMNEEDTNLQFLNDLFKRNYYISSDFIKNPYFDKKDESIKNKSKSLCINKTEVDELYNFLINLYLNKKCYSSYTVSNNIVRKLFDSKKYETLNILFKIKVIMELFNLFSTNERKTIDLTILGIGKKKSGTLTQGKKIILGKNERVKVIFESVTGFYKKVITLK

SEQ ID NO: 922 - protein, 1408 aa, synthetic construct; identical to SEQ ID NO: 636
  REGION 1..1408: note = MG44-537 effector

SEQ ID NO: 923 - protein, 1526 aa, synthetic construct
  REGION 1..1526: note = MG44-538 effector
MENKKYYLGLDVGSNSVGWATSDENFNILRLKGKTAWGARLFEEASDAKSRRGFRTNKRRLNRRKYRIYLLNQLFAPIITKFDKDFFARMSESNLYLEDSKINNKHYLGDLKSEKEFYKNFPTIYHLRKALCDESSVAYSDPRYVYLAIHHIIKYRGNFLRNDNFDISKFNLMENKKYYLGLDVGSNSVGWATSDENFNILRLKGKTAWGARLFEEASDAKSRRGFRTNKRRLNRRKYRIYLLNQLFAPIITKFDKDFFARMSESNLYLEDSKINNKHYLGDLKSEKEFYKNFPTIYHLRKALCDESSVAYSDPRYVYLAIHHIIKYRGNFLRNDNFDISKFNLEIFNHINDLFKNIISEESEVPVEDVDFEYIKEPLKILDILNNISLNKKDKQRELKAVLNHPIFEKAKRYDELFSVLITGGSYSISKIFDDEKESIVFDSSYDEKEPTYQSIFGEKFLLIELCKNIFDYVSLKELLGDSKSISEAFVNVYESHKEQLKALKELCHKIDEKFNLKRENSTYWLIFKNRSKDINNYANFVGVDTEGTRTGDINSFNKYVLNILSKYEEYLCENKNYLVLKSYAEKDSLLEIIANQSTSLIPHQLHENELIQIVNNCKKIYPEIFNLKEKLIELFEFRIPYFVGPLDTRSTKYSHIVKKDEYLNTRITPWNIDEIVDFDKSKEAFMNSLTNNCRYLIGEPVLPAKSLIYERYNILNKLNVLSINGIRIRKEVRNELLNNLILVNKSVTLNQITRYLKKRYNHYNNMELSVSGINSTDKITADIYVSFKNIFGHELSSEELKLSDEIIRVLTIFTDSFDDGIKYIKKNCCDLNDEQIKILKGIQFKGWAPFSYKLLCGIKIVDDNGVVHSILGEMDANVKNFQEVLNDNLYNFASEIDKYNESLSGNKTREEMVNELIDSVPPKMRRSTIQALKIIKDVVSIKGYAPQYFSIEVTRSDDEKRKGKETTSRVKEIDALIKSFKKEKEALFKEQSEKLNREYQNLLESNKLDKLNGKALYLYFKQCGIDLYTGQPINIEDVFDSTKYDIDHIVPKRLKKDDSLDNKVLVSREYNQKIKSGIYPVPERIRCNPEINKIWVMLHKKKYLTDKKYNALVRSSELTDDEIADFVNAQLNVVNQSNITLRNALKILYPESTLIFSKAQYPTFIREELNIPKLRDLNDTHHAVDAYLNIFTGVTLHKKYSSRFWYDQKYCSDKNNKTLSMETTLEESLKKDDLAKRIKLNCSKHDQLLTYRVEYAEDRFYKATINKHSDNKLNPIHENGALSDTTKYGGYNELINAYHLVVTIKGPKKTTKKFIGIPHIIAIKNNRDDIEKYIINNLSLKPNETYEFNDKFKIYAGQKIRFDGSYYLLYSKGEKVMNLKLFSPIFLNDTDVEYLKFYENHLEKIKNIDTKEIEFKTDKNEKNTFKLSSDLNIKLVNRIKEISKAKRLDSYGRVSFVRDYDISNFNNLSLYDQFFEIRKLYGCLTRRSRELSDGQIFTPTKSFITNSNIYIIFESASGLFSKEIKI

SEQ ID NO: 924 - protein, 1424 aa, synthetic construct
  REGION 1..1424: note = MG44-539 effector
MAKKYLLGLDLGTNSVGWCLTDEENKIIKKGKKRLWGVNLFKEASTNKDRRINREARRRTVRRAQRIDLLQMLFKDEIEKIDSRFFLKLNQSSLHSEDKDETIRDCNGLFKETGLNDSLFYKKYPTIYHLRDDLIHSDKKADIRLLYLACAHIIKYRGNFLQEGRNIQSYNSKDIKEILETINLCIEEIDNDIIDQEINISTPLCNEIIRISKEAKGLSQTKEQLYSALGINNKYVKNIIVPLIAGTEVSTNKIFDTDEEIDNVSKISVKQENFDENIALLSERFGDSPCFRLIIEAKKLSDIMLTIKVLGDEKYLSSAMVKRYIEHKNDLSLLKKYIKSTNKEKYFEVFRKSSSDLNNYSKYVGYTKYNGEPKINSDHCTKEEFYKYLKSVLCIDKFKKASDIDNDYLRTIYEKMSDGTYLDKQNSSENGIFPYQLNLNELLLILNNQSKYYEFLNKEDKYGSTKDKIIKLLSFKIPYYVGPLLAKKNDNPRGQYSWIVRDDKTKIYPWNFEEVVDLDATAEQFIQRMLNRCTYLKDCYCLPSKSILFQRYNVLNTINKYRINGNLISFNDKNDLLTSVFLKYKKVTKKKIIDFFKFKYGEEAKLTTSNEKEIEEINCSLSSEITFKDIFKNNYDEKLVENIIKDLTIFEDRKIVEKRLKNIYKIEDESIIKSILNLPEFTGWGRLSSELLHLKTQSINQRTGEIFDYEIIQLLRDTNYNLMEIIHKFNFEKIINEHNGEIKIEDHDLHSQIVNYVNDTYVSPGMKRSIIQALSIIEDLKKIIGAPIDEYYIECARTNKSQKGDKGRSLSRKDRLIQLYEQAIKACKDSLQKEHLTNFKAKASDEDNNKFRSERLWLYFLQLGKCAYTLETIDINLLFDNNFYQVDHIIPQSLIKDDSISNKVLVTARANESKKDKYPLNQLPFINHEASLFWKKLYQDHLMDEKKYNNLIRKEPISTDELEVFINRQLVFTNQAIKALADTLKIFEKDRNGKEPKIVYSKAENISSFRDYYDIVKSREANNLHHAHDAYLNICVGRLLSSYYNFYGEKDFIQKLRENHRSLNPERIWSDNAQKDRPPFINHIGEVIWDYRTTVNDIKKNIYERFDVLVTRRQYIDNGLLRKVSIHKANEDKGDNLIPLKSGNSTLGNAFTKTNKYGGYSDLVYGFFSLVKFKDKKDNYIISLEKIPNMFVSKKDNKHIENYLTKQKGYKNVEVIIPIVRINSVLKKDKTSIIVTGASLDSIIINNNSELFFDSKTLHVIKMIYALIEKAKSIKVKLENSTNPLLNDTFPLINNGDILVSPASNERSKARIIYSKDLITLFNAIKDKLALPIFDNISGIKSVNELLNKEDTLNLYLSLDSYKKVVVLANLLKASTATVSDLSLINGSKNSTVCTINKKSISSWKIVNQSPTGFYEKIIWKGGN

SEQ ID NO: 925 - protein, 1017 aa, synthetic construct
  REGION 1..1017: note = MG44-540 effector
ANDFEALVAKGITEKKQNIDDAFKSLATFEKENSADLPPDYKSLKKETMNLIKGNVADCTKLFGIEDLDEPIKIKFYADDFDANFDKLSDEQQGHVENIKAFYDLVKVKDLLGENSYLSQAKVKLYNEHQQDLKIFKSLIKEKLTQERLTAAGYKGTLQEFKKDIFLDEKDVDKSVKIARNNPDDKACNGSFYYNLTHGQRASYLEPSDKFKKGKAYSIYKVLTTLAKNWLSDEASGLSKEEKLLLSKLDNLTLLPTCTTKENCLLPYQLNEIELNKILEIAENKFTFLKVKGNDGLSVSDKIKSLLTFRIPYFVGPLNEHSKFAWIKRKEDGSITPWNFENKVDLSESAEKFIKRMTCKCTYLFEKDVLPKNSPIYCKFMALDILNNLHLKGRRLNTLQHGLVKEIFYDVCCKRKITKLNHIKKYLTDRGLLTDNDLLEGMDEDQSINMSSWIDFTNLLSTLKIDNLTPTSDFCEKVVFYSTVFGANQKLLKERLKEEFKDLSNKYPALIDKACKLKYSGWGSLSKELLVDIKGMSKLQPTDPDNILNYMEQGFGNLMELLSKNFTFSDAIKNINRKSRNSVNIFSYENLVKDLYCSPSVKKMIWQTLLVVKEITEDIMGYPPKRIFVETTRGNLESKKGQKTQSRYDFLNEIYKDILNNKDKCAICKEHDIDIKALSNELVSVSNASLSKNNNKLYYYYLQLGKCMYSGEDINLNDLSDDSLVDIEHIYPRAKGGQDDFSNKVLVKKIKNASKSDNSLSSAVVQKMKPFWQHLQKLGLLSNINDKYGTKKLATLCKAGNLSEMEQEGFIARQLVDTSQATKELVHLLEDLYGPNNTKVVSNKANMIFKFKSYYGLRKVRELNNLHHAKDAYCNIVAGNIYYTTFNSFNFSRVDEVFSTVSLDPTDKEKPYIFNYYLSKDKKEQIRKIYYRNDILLTEKTEETTGTFYDQTLYAKKAELESKKKNLPSELYGGYKSLKGAFDCLVKVTTKKTEYVKLISIPILYKNKVKEYLDKNL

SEQ ID NO: 926 - protein, 1349 aa, synthetic construct
  REGION 1..1349: note = MG44-541 effector
MGKKDLIIGLDVGSDSVGWAVTDENFNLWRIKGKTAWGARIFDEASDAKTRRTKRSSRRRQARRKYRIYLLNQLFTPLINEKDPSFFVRLENSTLLNEDKAEAAKDKWPLFINEEDEKTFYKNYPTIWHLRKELMSNPDSEAFNDVRNVYLAIHHIIKYRGNFLTNGTIETKKFEPSFVDDVNQYFRNLLNSKNEDEVETDYCFLSPSKIKDFTNALENTKYNVRDRKSEILKLVDKGVEELKPYIELFVSLVSGGEFDLKKIPEIEDSCKVKFDNSFDEKADEVASLLNEDYALVFYAKRIFDFFKLKDLLRNEESISAAFCDVYESHKEQLKFLKELCKDLDKKHELEREDSLFFKLFKDKNCKENYPAFVRVDSNEANTDPHIFNSYVVKLFSPYEDELKDNPGFKKIKELCERDECLLTIANCSTSLIPHQLHENELVAILENASKHYPEISEIKEKVIKLFEYRVPYYFGPLNDRSNFSNVVRKNNSTITPWSIDEVIDKEKTREKFMEGHTNSCTYLLGEPVLPAQSIVYQQFVILNRLNTMRINGALIEQAVKEKLLAFILARKKTTIHQLKVFLKKQYDDYKKDDVSISGINEEDPFVSDSYSFFLDFFNEKEALNDKEVEEAEKIIYALAIYTDNPSDAVEYLEKVELFKFNEQQRKALASKRITGWGRLSKKLLVGLRPADDNGVASSIMETLRENIVSFEALVASDEFKFGKAIKEHNRMFAGEKTQDEVVDTILETVPPKMRRSTIQAIRIVDEIVKLSGQKPKYISVEVTRGEDEKKKGKTTTSREKEVADFINSLLKDSDNYLKSQASHIKEEYEKLQRDDNLLKLNSRHLYLYFKQDGIDLYTGKPIDINDVLNSDKYDLDHIVPQHLMKDDSLDNMVLVERTYNQNIKKGYYPIPEQIRCNKDIRALWDLLHRKKAISDKKYNNLIRAKEITEEELNGFVNAQINVVNHSNIVIRDILKVKYPNTRLIFSKARFPSFLRKEYGIPKMRELNDTHHAVDAYLNAVTGVTLTKEYALDYAKHRSLDKTYNMEKRLLDVLGENKKDERIQKICGRTDFLLTYRQQFIDSSFHGETIYKHGDGDLVSIHSNGAMLNTSKYGGYSNLTVSYWVVATVSGKKVRKVLVDVPVLWDKLYSQKEDLYHALCSSIEIKDNEKVTIDLSRKILPNQKVFINGATYLLCNFNKNVVTLKPETPIYLESDDIMYLNGAIKRRSEFKECIGDVFERVSNRKGDEFFSVSKEKNKKILDKLVAISAKNRYDYCPMIRDVRNFSNGLEGKSLYEQIGFLKSTILLFTRKSTLSEQKRYFSKSKQSFLNDKVEVIYDSITGLKSYKKEL

SEQ ID NO: 927 - protein, 1388 aa, synthetic construct
  REGION 1..1388: note = MG44-542 effector
MKYSIGLDLGTNSVGWAVVDESRHLVKKRGHGLWGVRMFDEAKTSSDRRSYRSNRRRLGRRKFRVKLLRDIFADEIAKVDPTFYQRLDESFFKKEDKSDLDFVNLFNSSSDLTDSEFFNKFPTFFHLRKYLVNSDKKEDIRFIFLACNHIIKYRGNFLTGGEAFETSDISRIKEIFEQFNDICANYANDNEDDEIFFSQININVPNFFEKFGEILLGSKYKKDKIADLISLFGVEKKTLAAEGFIPFLVGSDFNLSNISYVKDNKYDKVSIDLSSEELVSQIEEAKNTIKELAEFIDFIPNIKIIIDHYYLVKLLGESDANISDAMVNQYEKHNADLKLLKKLIRDYGTHEMYDNVFKTVNDKVNNYPSYIGMNQSNNVKERFKHCTRDEFYKFIKKEVIEVIRKKFDGTNNDVFSILNKIESYIDANNFLLRQDSDLNGAIPMQLHLKELKLILNNQRKYYPFLDEITSDNITNYDKIISIFKFKIPYYVGPLANISSNNENAKEKAEFAWVTRTNKKILPWNFDKVIDKDETQKTFIRRMQNKCTYLRGDEDYCLPKFSILYQKYACLTYLNKLVIHGEKISVELKKDIFNNVFLKNNQPTKQNIVDYLKANKGVTDVTTTEINEINVNMKSYIKFKEIFGDSFDSNLDMIENIILDLSIFEDKAALDGRLRKLYKLDDTKVKAIKGLNYKGYGRLSKKLLNGLIVADPITGELDDKHGTVIDIMWNTNMNLQEILYDDKYDLLGVINEYNKEFMPDLQSLTFNEYVEDYLYVNPSMKRSMIQAYSIIEEVEKILGQKLDKYYIECDRTNQDKRKESHSRYDSLKDYLSKCSDEFCSFGIDIKEIKEQLELNKDNLKSDMLYLYFTQLGRDMYTLEPIDFDNLLKKGIYDIDHIYPQAIIKDDSISNRVLTKKANNTRKTDAFIFEIPNFLPKNAYAFYQLLLDKGLITKEKFRRLTKHELSKEELDGFINRQLVATSQAEKALIEALQEYKGVARENIVWSKAENISDFRHKYDIYKSRTANNFHHAHDAYLNAVVGGAIDDYYRLNSIVNYKDYQRLKNDKKTINPLTIVSIDRYFNGKLIWKHEDMLKEIKKNIFKRFDIYETTRTFIGNNMFAKTTVLPAGKGNIPVKSEGPLLNTDKYGGITSPQYSKYVLIENISKKKTEYVLLPIPRTEVNRINQYILSLGYSNYKILLHDLRSNTVIEEGNLKYCVTGVTNKSYWIKNLNDRFFNEKLIKVIHDIDKYINNLKNKVVMINDDNHVVVSKTKNDDCKEIIIKNEDLNELVKNILNKFTNKKYSFGTIEGLNTNIDINKILNLTITDKIYVINELLQLLKTNSKGSADLSLIGLAKNSGSLKISRNIKSGMKIIAESVTGYYSKVLFEVK

SEQ ID NO: 928 - protein, 1408 aa, synthetic construct
  REGION 1..1408: note = MG44-543 effector
MENNKNYYIGLDIGTNSVGYAVTDENYNIVRKKGKDFWGVRLFEEAKQCEDRRIKRANRRRNERKKIEKSWLNEIFAEEVAKIDSELFLRMKYASLIKEDFDKQSSCGRDNILFKDKDYTDKDYFKEYHTIYHLRSELLDKPAKDVRFLYLALYSIIKHRGHFLLESDLDTESSDSIMQDINVSIDLYLDLFGNQKYSIAKLDRESETKFLDSLTSGTTIKDLKNLIKELLFATEPKEKLVAEAFITGKVNVTKLFDLEEKVPDIDFSTDNYEIPPLPEECIKLLLQIEKTYKNIQLRKILSKHDYICQALKDEYELHRNQLKNLKEFIKKYYPKKDERHSIYSQVFRSPYLSSKSGVSNYSLYTDNCYVNNKKIRVNLKSNEANKLDDFYSFIKKILENKPTLDNYNVEEFENEKAIIISQIENKTFLNKLRTTSNSVLPNKLFVKEAKRILKTNATKFEFLNSKDENGMTVSDKIISILEFRVPYFVGPITTKDSQYKWAVIQNKNLPLRPWTLDKIVDMDKTEFNFIQRMTNNCTYFKDKDVLPKCSLLYSKFSVLNELNKVKVDGYNLPVNVKQDFYKKVILKKKKVNSNDIKKYLIENGKYLKEDKDNIVITGLIDDELKNNMASYITLSNVFGEDFVKNNTLMMERIIFLHTVLSDKNRVAEIIKKEYPDLSEDYIKKIKSLVFAKWGVLSQEFITQKFTDVSSGEITSIIEELFNTNQNLQEIINNNNYYVTEHNCLFSQYINNYNTYSGEITYDDIKGLFVPPAVKRGVNQTFNIIREVEKIMGKKPQKIFVEVTRKDEEKKQKPSRKKKLIEIYKSKGYKEEIEKFGIDLNHLLAEINKEEYSETYFSGSDKLYLYFMQNGKSMYSGKPIDINSLLDDNIYDIDHIIPQSIIKDDSLDNRVLVEKVLNNDKKDTYPIYTKFPEWVNNNIDYWKFLKDKKMISEKKYLNLIRKEELDDDELNAFVNRQITQTNQENKVVIDILKHYMDKPENVIFSKAHYVSEFRKNNDIFKSREINDYHHAKDAYLNIVVGDVLYNRFTKPYGTAKLTGNTDKLFDYPVYNLSGKMVWNGTEDKNRIINICQKNSCLISYMPLSNKNGAFYDETIYKAINTVNKIPLKGKGFLNDTSKYGGYTTLNNSFFMVIQSDYKKGKKITIEAVPTLIYQNAVKSENKDKFILDYLATENNLVNPCVLLPELKKRSLIMIDNGKYLITGKTGEQFSIKNVNQWNVNNTTTAYIKIIEKFIKKSKDKNWLDNTEKTDDMIVVAKGFNKQERYNKKPKLQVLTKTENLNLYNILINQLNKPFMHSNHKNVAQTLTEKTEKFKKYNVQEQALLLFNIIQYLTGTRQTTDLHLLSDDPSKMKAVGILTLGKNITDLNITFLAQSPTGMYDKVLYRVKTK

SEQ ID NO: 929 - protein, 797 aa, synthetic construct
  REGION 1..797: note = MG44-544 effector
KDLKAEDIHANLKPFIDMMNDKAFGPALLTDKKSFETAEEIINLLTILEDKNLIKEKLSTLGLSKNQLNFVKSLKYTGWGKLSKKVLADLKSEVVDETGEVYDASVIDLMTDTNLNFMEILETKDRFSFRKQIDELNNVEEMTPYELIDKEYASPAMKRAIRQTFRIIDELKTILSIDGFDSYFVETTREEEKEKKRTRSRKDQLQDYYNAAKQFVSEEIQEQLSRQTDDSLRKKKIFLYFTQLGKSVYTGKPIDLDRLDKDYDIDHIIPQAKIKDDSINNTVLVEREINNKKQDNYPIPFDCITEEGKNWVKVLNSIKSKKEGTKLLSDEKAKKILRTPNNPLTDDELVGFVNRQLTLANQSIKAITDILKAVDSKANIIYSKATLVSDFRKAFGFSKCREVNDFHHAHDAYLNIVVGNTYNKVFTSNFNKQVLQNRREHFEQTKINPYNFFARNQMIYNTPAYVWKANKYYKDEEGHIHEEVVKDSSMEIVKKMMSYNDPLVTQMLYTQPGFMNKTSIVSKRNTTKDPSIPLKAGQSMEKYGGYSDLTTPYFILVRSEGKKSKHIYSLESIPTMIISSLTKEEKLKYLAEHNGLKNPEIIKDKVLIRSVLKVPGPDNSYSLVGISGKGDKQRLSVINLSELKLSKKYYYYFSLISHFALDSTGKEKDFSKCKECPSITFNQSIISKKLNEELFKHLIDNIFNRDTYKSLPIVSASFSKMNFPVFSSLSLFNQLIVLLRLVKLINCKSVRLDLSPIQLSANVGIIMINKTLKPGTQLIQQSITGFFSKVIFEVPED

SEQ ID NO: 930 - protein, 1336 aa, synthetic construct
  REGION 1..1336: note = MG44-545 effector
MKKDFYIGLDLGTDSLGWAATDTDYNFLRLKGKTAWGSRIFEGAKSKKERRVYRSSRRRKERQKYRIQLLNSLFAEEINKVDKTFFLRLENANLHMEDKDKSIDSKYLFKSVEEEKLFYNKYPTIWHLRRDLINGDSFALSDLRYVYLAIHHIIKYRGNFLKEGETNYNNVTEEVIERINNCLSLLAENIEEESSSLSKAKLTELKNILLDKNINKTAKKKKIIELFDVVSCKEYIDMFATIVTGGNYKLSKIDKALEERINFTENFEETEDQIAQDLGDAFELVKCAKELYDFASLKELMGNEKYISFVMANIYEEHKEDLATLKKVIKEIDKNKDLSGKDSLYHLVFKNEENNNYAALVGVNPKNKKITLEDFNKEIEKILENNKEIIEPSDYKELDEKVKARQLLRTIAHNSTSLIPHQVHLIELKEILKNAEKKYPFIKDISEKIITLFKFRVPYYYGPLDSRSEFAWVERKSNEKITPWNISEIVDDNATKERFIKRLTNNCTYLLGEKVLPKVSLIFEEFMIRDRLNTMILNGALLTNETKSLIYEYIISRNKTTVAQIKSFLKNKTATKENDITISGIKEDVPFEATSHATLGKLFDLKHDFDKVEHLIFLATIYADDKKSFKSLLTNSKDLSKKQIKAILNLPTKKWAPLSKKLLCGISYVDDNGIAMSILDVMRETNQNFQMVYNNKDYGFKDLVDMHNNEITGNLSTNQKIAMILEDTPTITKRSINQALLVLDDIVKASGNNPKKIFIETTRENDAKSKGKEKDKRYVELKRLISKDIEIISKENKKELLNELELNQANVKGRHLYLYFKQMGLDMYTGEKINIEDVFDSTKYDLDHIVPQSLIKDDSLDNLVLVNRLANQRIKGSQYPLPRELKTDKVIKTWQYLHKIGAISDKKYNSLMRTSEITLEEIEVFVNRQINVVDYANITLRNVLKIKYPDTQLIFSKAQYPALLRQELNIAKNRDINDAHHAVDAYLNVVAGNELTMKFSNVRRIYAERSNKEDKDSRFFNMDGYLKNFVKKLDKNGVTYAEKIKKNALRHDALVTFKVDYQNGALYNATIYRKANDSNLIPIHTNGPLADVSKYGGYSDLSQAYIVAIEYNLGSKHYKDLLRVPLLYIKLYGDNNETLWKKVIGNDVASDIKIIKRIHLNQKIKYKNCIYLLYTADGKRNKYKLAYQSYLNNDLLCYFNKCDSLLDSLSSFDGDIFETKVNKNGDSFVVSKSKNIEIFNSIREIYDNYVFDGCNFIVKARNMDDNLFSNLTLYEQIVTIENMILILNRKSERAKFDYRLGNAKANVFYVTHNIIDQDITLIFESPSGLYKHEEKI

SEQ ID NO: 931 - protein, 1438 aa, synthetic construct
  REGION 1..1438: note = MG44-546 effector
MNKLLVGLDIGTNSVGWCATDENGKIIRKNGKRLWGYLGFDEAKDASERRMYRCQRRRLNRRRQRVELLRGIFENEISKIDNSFFYRLDNSFLRNEDRFDSQGNPKPFKWTLFNDRSFTDKQYYDKFPTIFHLRKYLMESDEKADVRLLYLALHHMIKYRGNFLNNSKEFKVMDKDEILGFLQSMNDSLVNMSEQDDRYSFLEYDDSKFEDLKRCAEESRGISRFKESFNALLNPQKNKFNSDVVIALMAGGEVNIERKICPDAEDSGGDALDGSLCVSKEDFEDKIDLLLSSGNIDEDMVNVLLGCKRVHDYFLIGKLIGKNPSLSAAMVSRYEEHKRQLDELKAWVKKNHSEKYHRIFRLVDADKDKQKVSNYPAYIGSNNGNGTKERFKHAASRDDFYDFLKKELNLKGSEDDFAKEVCSLMDRNEYLLRQCSNENGVFPYQLHKLEMQIILDKQSKFYPFLNDMDDGLSNRDKILSLLAFRIPYYIGPLTPPSVKTEEARKFTWAVRSGNRILPWNFDKEVNKSESARNFIQRMLTKCSYLKSEYCLPKNSLLFSYFNTLNNLNKFMLNGTYLSYDQKMDLIASLFRKKRKVSKKDILGYFKSKYGANDVSLSEKGGVEGFSERYDINFNMASYVDFAGIFGEGFDKDPDKRELVENIIKDIVIFEDKDILEDRLKSEYGIADASVIKKIKALNYSKYGALSAKLLSGLKAEVVDEDTGEVKERSIIQIMELNNQNFMEIINDSKYGFQDIIHDYNYEHGVAFNESIEDYVANLGFVSPIMKRPMIQAYKICEEIEKITGHRIDEYYVECARTNKGEKGKKGMKSTRQDQVRGMLKEARKTANDFISKSLIDNIGKLAEETDTNRFRSDRYYLYFTQLGKCMYTGEDIDIAELDDESKYDIDHIYPQSLIKDDSLSNRVLVKKTANMRKLDEYPIRREILWQGKGGSQAAEKFYDYLFEAKLISAEKHKRLMKRELTETDMESFVNRQLVSTNQAVKCFISAVKELKTIPESDSDAGFTPKVVYSKAENVSDFRKKYDLLKSRTVNNFHHAHDAYLNIMVGRAVDAYFCFYDNKYRRANYYLDMHREGKTTNVMKIFDQFRDPSKRKKDIKTSEGYMVWSFDKSLADIRENICRRFDIFSTERTFVANDLLKKTTVYPKNVGNIGVKSVGLLSCTEKYGGFLECRFGSFCLIRMAKKGYMIKPIPTMYRNCPERYLSDKCGSFEVIVPVLNINTLIEKGNMRFSITGVAGDGRYWVKNRKERFFSYENVLKIRKCEKLFGLIDGKATGFETPEEMRGRGFLFKDDRTIIVSPARNKDNFEITLSVGELDCLFDAFVDMLGKDIYAFNQSLNLKRKLEENKCKFDELSIFGKCVLIMRLLDYLKCNERKAIDLSIIGLEKNGCRIDFNSKSKGYRIVFESITGFYRKVVFEVPEA

SEQ ID NO: 932 - protein, 859 aa, synthetic construct
  REGION 1..859: note = MG44-547 effector
QKVLPWNFDDIVDRAASGEEFIKRMTSKCTYLRNEDVLPKQSLLYQKYLVLNELNNVSIDNNKIDQNIKKAIFEELCCKGIKLSKTKIENFLRDKHLISKENHVTYNGSFNESLSSFDKLKKILGDKFNDTMCEDIILWHTVFANEKDPVKSRIIEKYGQELNPSLIDKLSRLAFTGWGRLSRRFLTELGTTDVRTGETALSIIHLLEDTNLNLMQILNSDNYSPSFINLVNQENTLDTSETLNYDYVKNLYCSPTVKRSIWQAIRISKELTQINGCDPEKIFIEVTRTNDLKNKGKVTDSRRKQLQDKFNKTKKIKDDLSQLLDEFNKRTDLREFRGDRLYLYFMQLGRCMYSGEKINLDELYDRNLYDIDHIYPQSIILDDSLDNKVLVKRHINAVKSDNYPLSSDIRNSQRAFWDMLKKYDFISETKYNRLISSKELTSDIIGGFLNRQLVSTNIAVKETAKALSQIYPGNNRIVYSKAGHVSDFRHMFGIVKCREVNNIHHGHDAYLNIVVGNVWHSTYLRYWNSNCTFNENNALNKLFYKDKPGFWSTSYLDKIRNYILNSDKYLNKFVVTKTPIDRKGSFYDATLYPKGVAQFPLHNTSAYDIKKSGGYKNQYASYVCAVEYKNKKGITETDILPVFIKDRNEASQNMKEYVSRNFGVESTRLIYSHIPFDSLLEVDGVRYYLRGRDLKLFQLVVATEWQPSSEIISIIHDINNCLSKINQKELTSPDDNSVEFEFAKGKIISKSDIKLVFEAIVNQLKKPFYGKYAFVKKFNEGKLNIDKFYEANLLDQMKFILSMLNLITLNGSLFNAELIDGAANETCKYLTNLKGCSVYLISQSVTGLYEKRIKIIDPQ

SEQ ID NO: 933 - protein, 1054 aa, synthetic construct
  REGION 1..1054: note = MG44-548 effector
MKHAVDSKDKKENKKQEENNKNDLAVSCSYEDFLKYVTKLLDNNKHLSENSDYKYIRDAIGTEDFCKKIRIKDNAYIPHQIKAHELKSILKRQKNSLPDLLTDENISKIVSLLTFRIPYYVGPLSDAHSNFAWVERKNPHSTVKITPWNFNEEVDLNRSGEKFIERMISKCTYLKNEYVLPKQSILCQKFEVLNELNNLKINGDRISHKMKIYIYDNLCKSDKGISLSKKKIKDFLISRGKIDKNCQVGKENENDKVFNSNLSSLIQFRKILNQDILSKDDEIMCENIIKWHTVFSDEKTPVKERIIDNYKGRLNDQQIEQIMRMNFKGWSRLSEKFLTGITTHRKENEFSQLTIIDLLEKEEHNLIEILNSNNFSPKFLDIVKEINGKNDVVKFDYEHLVKDLYCSPIVKRPIWQAIQICKELAQINKSNPKKIFVEVTRTNKSDKKGKITSSRKEQIEALLKTALKDSSEYEKIMNELNKKNHQELRSDRLYLYFTQLGKCMYTGETINLADLNNEKLYDIDHIYPQSKIKDDSLNNRVLVKRITNANKSDHYPLDKFIRDNMRSFWEKLKNSKLISQEKFNRLICSTELTEEQIGGFVNRQLVSTNQAVKETIGILETIFKDTKVVFSKAELVSEFRNRDNHKLVKCREVNNLHHAHDAYLNIVVGNVWHTYYNDNFFNAHRIVSDKAIDKLFVDNEKHSNKYWKNQYDIKINDYLFNNKKYLNKFMVVHAPKEVKGPFYDQTIHPKTKGLYPLHEDSNNNDLWSVNKYGGYKTENTAYMCCIKFMTPNGAEIRGLYPVSVKNATKFKNNKIGLLKQICQENNINIAKFSPKFVKDKILMFSVLEIDGIRYYFRSKDLQCSADYEWYPDQEITQIIHDIVKFEKRVISKEFEEEKEKLDNNYNGDLPLRTRKINSKEHENIYLTKENNLKVYDALIDQLKKPMYKEYPFAKAVICGKISRNSFINLGTYIQIKQLLNIINNVAIHNGSTCDATKINGDKTHQCKCRINYKSPNLDRLSKQNLNKIGAGKHIITLISQSITGLFEVKIPLIF

SEQ ID NO: 934 - protein, 1409 aa, synthetic construct; identical to SEQ ID NO: 638
  REGION 1..1409: note = MG44-549 effector

SEQ ID NO: 935 - protein, 1644 aa, synthetic construct
  REGION 1..1644: note = MG44-550 effector
MKKQNNYYIGLDLGTNSVGWAVTNEKYELLHLKRKPAIGVNTFEKAKTAEQRRNYRSTRRRLARRKQRVLLLQTFFAEEVAKKDPTFFLRLNNSPYFKEDKHHSLQDTKFSLFNDKDFTDKDFHKKYKTIYHLQNDIISQPDKKFDIRLVYLAVHHLIKYRGNFIKQDENINVAEFTNSLVTDAFQELAHYFEDTDLIAAQNFFVNENVRKYEAIVSDKTNGGLKRATDKIFEQFEIKDKTLKTLLSLALGKVTRLNQMKKQNNYYIGLDLGTNSVGWAVTNEKYELLHLKRKPAIGVNTFEKAKTAEQRRNYRSTRRRLARRKQRVLLLQTFFAEEVAKKDPTFFLRLNNSPYFKEDKHHSLQDTKFSLFNDKDFTDKDFHKKYKTIYHLQNDIISQPDKKFDIRLVYLAVHHLIKYRGNFIKQDENINVAEFTNSLVTDAFQELAHYFEDTDLIAAQNFFVNENVRKYEAIVSDKTNGGLKRATDKIFEQFEIKDKTLKTLLSLALGKVTRLNQIFSDEIVDDEQGKITIDFKSISYEEKYNDIKTVIGEVNIVLIDELKRLYDYFVISRLMDGKTLVAEAMVEKYEKHRSDLALLKKIFREHASKEDYRKVFTTLYTTDDKGKKKVITDVNYPRYIGKKSPYVIVKKGDYADFKKFLNKMFKDLGLLSLNDVIKVQEGLDDETFLPLINSKDNATIPYQFNEYQLRLILENQSKYYKFLNEKVDESSLTTLEKIMSIISFKIPYYIGPLVAEDNHPFAWVKRKSFEKVTPWNFSDVIDEATSASRFIERMTNKCTYIPTEDVLPREAILYQEYLALDVLNNLKINGEAIDNYAKQTLLTALYSNKTPLTKKRIATILAKNKNDVVAVSGIDDDVKLAFTSLHKFKAILGENQDLTIEDMEKIIFYRTIFTEKKMFNKKVDELLGHRLSEELCKKIKQLKFKEWSRFSNAFLTGFSKTLNKPVLFDEKTGEVISIIDIMRNNVLSLQQVIHHEKYGVLEALNKYNESMKTNENAFEDVYNLYLSPSVKRPVIKAIHLVDEIIKANDNKLPKKIFLEVTRHDDFARKGTKTISRKKQLDDLYKIAVKESKDLKDLMDELNKKTDADLRSRKLYLYFLQHGKCLYTGNPIALENLVMGDYDIEHIIPQSLITDDSLNNICLVESNINKAKGDVYPLPRTIVNVEKMKPFWERLMKRGFMSESKYQRLIRMSELTEEERFSFINRQLVETSQANKAVAKILEDRYGKGSVVYSKAQRVSDFRHKFKLLKQRDLNKAHHAHDAYLNIVVGNYNDAQTRLAYINKQTGKNFKFNPATAFEEKSFLDVWDKKSNLATIKAVLSRKNILFTQGTYISKGEFYDQQLSPAGEGKLTPVKESGPLSDTTKYGGYSSLNTSHFALVEIPKKRGSERRLIQVTRLHFAKIASGKMTLEEYLITYVGLENPKVIIDVIPLNSLIKRGKTIRSISGFDSGNTLIAHNHQEPFFSKDIEDSYYYLNRYLREIELREKEDTELLTSNEPYTIIIGNRNEKEKVQKIVISKESNEKTYLELAMHFAKDIYEHIFRGVNDTLLSNLDNFKTKSIYEQANIIKQLVMLLQTGALPASINLTSVGLNKSINRNRNINLIEKGDKLLIQSITGLYDKEICLA

SEQ ID NO: 936 - protein, 1369 aa, synthetic construct
  REGION 1..1369: note = MG44-551 effector
MENFYLGMDIGTESVGMACTDEQYNLLRAKGKDLWAVRLFDEAKSAEERRVKRTARRRLQRRRQRVEFLQGVFAPFMQDDRFFIRLNNSGFYAEDKDESLKTRFSLFADENYSDVEFYEKYPTIFHLREKLVKGENMDLRHYYLALHHIIKYRGHFLFEGESVSAGRDLNKLFSDYNEVLNVSGLENGLYLNKDFSQKFLEIALSKTGLNDKKKSVIALFRVNDVLSKEWVSLLLGGSAKPTKLFGEEFEDKYKEEKSLQFKGMQDEVFDSLVDVFEDEHFSLLQTARAIYNFVAFEKVLGGAETISSAMVAIYEKHKEDLQLLKSFVRENYEKDVYYTIFRSRKQTANYVNYVGYNKANYKKVNVKKCNDVKEFYKFLNKVLKNDKLKDNETYNYIVKEIENETFLPKIINADNGLFPHQINGAELDLILKNLCTYYPEFSEKDDSGFSPAEKIKKIFLFKIPYYVGPLNNAHEDGGKGNSWIVRKQGKITPWNFEDMVDFAASNEKFIRRMTNKCSYLHNKDVLPKGSMYYQAFDVLNQINKLKIDGAPITVELKKEIFKNVYLRNRKVSVKTIENYLVTSGKCTREELKETPIGGFDTKADLKANMSSYVIFKEKFGDMVDKNPEIFEKIILWHTLNTDKNLVEKMVLDCYGEIPEIKQNIKWIKGLTSFKEFGRLSYELLCELYGGIDPVTGEAYNVLNRLYNTNDNFNQLLFSEEYTFGAEIESQNSGKSQEITYEDVADLYVSPMVRRGIWQSLQMVDEYVKAVGKAPDKIFIEFTRQDGEKGDKGRKKSRKDQLLELYKDVGTDCRDLEDLIKELNHTDMTDSRLRSERLFLYFMQLGRCVYTGERIDLEELATDLYDVDHIVPRSMTKDDSLDNKVLVKRVKNAEKTDQYPLPVGFTNQQAFWKLLRSKKLMSDKKYSLLSRIKPLNGDDFREFVNRQLVITNQTVKAVAELLKRKFESEKTKIVYSKASNVDEFKQKFGIVKCRETNDLHHARDAYLNVVVGNVYDTKFTSAFDYFYQKEDSSWREYNLKRLYDFPIKGAWNGKEDIARIKTIVQKTSMRVTRYASIDMGKFYKESVLKKDDKSVSYPRKGVYPYNIQSDKGCYKYGGYSSVQRSYFVVLEYTEKDNRKRVVLGLPVMVEYQSKGDINKIKQYFESVEQLKDVEVIIPKIKKNALISYNGYRGYITGASDGCITFSNAIQWFSNEETDKYVKAIFKLMEMDKQGKVSVEEKGSTAFYIHTNRQQKKTLVINCENNEKLYDTIVKQVNLKVYQSINAFKTLKSVLEGKKSVFVEKTVFEQAKLLSNIIGYLRRGGSNGFDLSLLGASATSCKLRVGCNITDVDFAIIHQSPCGLSERIQKV

SEQ ID NO: 937 - protein, 1429 aa, synthetic construct
  REGION 1..1429: note = MG44-552 effector
MAVENTKEYYVGIDLGTNSCGWAVTDKNYKLMRLKGKDAFGARLFSEASPSKSRRTNRTSRRRKARQKFRIQLLNSLLGPALEKVDPDFLIRLQYSALDKEDKKKYSGRDIKSYPLFPAKQKEVEFYKKYPTIWHLRLARIKGNPDAFSDIRYVYLALHHIIKYRGNFLWEGKMNPQDDSQMDVVLNDLNKVIEDLCSTEGEDSDDDPIEIAQISPDKYKDFYKILENHEGKVAQQKAIRALANPQDDIQKKYWELFAKSVTGGKFSPLEQDEDDKVSYDFAHFDDEKLTECQDKMGEAFSIIEKSKQIYDFFILKSFIKERKEGNPLSISSSMVFAYQQHHDDLLAAKHALHAIDKKLGTYNAADSLYYKFFKDPKGEHNYPAYVGVDSIATKKRSGNKTNEELIKAFKDLIKENTDVISKEDWEILNAHINNTNKDDNTFRPRIAHLSTSVIPHQLHENELDSILTQASNYYPDVFTSERNAKIKAIFKYRIPFYFGPLYGDKHSNVVRKDPNNHERITPFNIDDIVNKEETRKKFRNSLTNSCAYLFGETVRPKSSLDYEEYIILDRLNKIQVNDHELTGDEKKEVLDYILGRGKTTKANLVHHLAIVRNRKLDDIRVSKMDDKLPFASTSHAYFKKAGYDLVKGHDRIENVILLSTIYAENKSELKEAIKNNYPEFTDKQIKQLAAFKTNKWGRLSRKFLTDFHPVDKDGVVNDGSNILEIMRRTNQNLNEILFNPEYNFQELIKQSNDDYFDKNNKNKVDDILDNVPAVFRRSCNQCLLILKEIKNAAKGAPEKIFFEVTREDLKEKDKKRKDSRKEQIKAIYKQLKDLTSEFSEINLSGLTDQLNSEQITDDKLRGKHLYLYFRQLGRDAYTGKPIELEEVLNGTKYDTDHIILQSLIKDDSLDNLVLVNREDNQNTKTDIYPIPSQIKTGFVLKFWHYLHEKKMRSDKKYNNLRRNTRLTEKEIHEFVNSQINAVNYSNKALKDLVEEIYPNTKVVFSKAQYPSERRKEYHRAKLRELNNAHHARDAYLNIVCGDILSTEFSDIRTIYARKKRELEQKRKDPNHSKDDKGEKTFNMVATLKRHREYNNGALAKQCQEVYHKHSALITYALDYADPSFYNQNITSPKKKGDKANKLIPIHTKEGSPYLDTTKYGGYDSSGTCYRYLVSYSEQKGKKIKKALKFLNVKNYRIAESKSDEELLRKQLVTINELTNVKDLKFLAKVYNNQKVEYQNCVFVLASNERAKLGAYNAYEIYLDGTFAEDKATETYTEYLKNSKKYLSYLPSDPKKSSLQIKVNRFSEDEKSPKAHILTFSKEKNLTLFNTIRSIANTKSKSGKSVFEHYFTSKLKDFSEEEFKAKDLKSQSAILLARISVFQDSSGNSILTYYSKFTMDIRKSLNITGPITLIYDSVTGLYSKSKTYKL

SEQ ID NO: 938 - protein, 1462 aa, synthetic construct
  REGION 1..1462: note = MG44-553 effector
MINNLNLSECLDDVVTKEPSDVVTKEPSDVVSQKDGYYVGLDIGTGSCGWAVTDLKYQVLKKSKKRLWGVRLFPTADTAAERRTFRCTRRRLQRRNWRLNLLKGLFEAEINKVDPAFFMRMKESMLQDDDRTTTARNALFADENYKDKNYAEEYPTIYHLRLNLMEKAPKDIRLLYLAIHHILKHRGHFLFENFNVDNISGSFETIWRNVSNIIVEKVFLTPDLESESIDDDGDDGDLNNNAIERLQSYGQEVLQQLLSLNRNRTDVKKRLSSIFEEALGEKADKKKKKSIEQCVAALVGAKFKPFVCVSDDEPEEEQLKIELCFSSASYETDFATKLGSTQQSVFAILKKVYDFVRLQNLLGGRKSISEAKVEMYKEHSKDLIVLKDLIRNSDHLQDNEKTSLYNNVFKKYDAPLKCVGECLYETILRYRALEIKSTTNKDLAPAKALYGQLMEIAQKFIEMNAAGAVIEPEILKVCNRIVDGTIFSHAVSVENSVIPQQLHAFELKKILENAKAQFPFLNESDEFGTVVDKIIKLHSFRIPYYVGPVNNYVGELNNSGNKHAWCVKNEGVNLPYTPWTFHKIVDTKKSAQEFINRMTSKCTYLRYADVLPKCSILYSEFEVLQELNNIRFNGRKLKHEQISLLIEELYKKDKNVSLKKLKNLLVSRMGFSREDVEVVSGIDMELKGNMASYVQLNELLKTNGIQLKDEKQKIDVMEQIVLWVTIFEDAKVLKDKLSQELGYLLNDKVINSVVGLRFAAWGRLSREFLENVLGRVRNDKLDIPVNIMTRLRKGEGNLMMLLSDAYTYSETVAKLNEQSSEVKKYDSISYDMVDELYVSPSVKRMIWQSLKVVDEIVNIMGGVQPKKIFVEMARGEEKKPERTVSRKKYLQDLYQNCRKQEPELAEQLDKVENSSLLNERLYLYYTQFGRCMYSGEAIDLEKLFDSYDVDHIYPRCYVKDDSLDNKVLVKRTLNGIKSKTYPLGAVADIAKNFDVCRPLWTKLRDKGLISNEKYKRLIRTTEFTQDELQSFVARQLVETRQSTKEVCNLLKQVYKDSRVVYSKAGNVSDFRHKFSFIKVRELNCLHHAKDAYLNIVVGNVFDEKFCHGDIRKFFSICSHNEEGYTFREGDTDVFSKPGDRLKKLGVWSGPEQIGAIRKQYRQNDIFVTELQEIRSGQFFDMNLSPKEAGLIPPKDIRVQTKNELVSGEILPKTGLDTSKYGGYKGASTSYFAFIEYTEKNKVVRSFAAVPVYINSMKGNLKDNIKDYLVKNGYASPKVLISQLKMLFFLRDNKTSLTFKVSGVSDGRLLCGLAEQLTLSEKDTAQLKKVVSFLKKLNEDNSYQYSPKFAGFSDSELNELLNILKWKITNTKFKNISDKVTSLLEATQFDENLVLSIPDKAKLVMNLVGIFENRDHSNDLSLIGGKKQMGRLLKSIKPNGDFSIVYQSVTGFYVHEIKLNELK

SEQ ID NO: 939 - protein, 1353 aa, synthetic construct
  REGION 1..1353: note = MG46-43 effector
MKERSDYYLGFDIGTNSVGWAVTDENYRIQKFNGKLMWGSRLFDEANTAQERRMHRTLRRRLQRRRWRINLLQELFAEEISIVDVGFYQRLKDGALLPEDKSENQIYTLFHDADFNDTQFYEKYPTIYHLRKALITETDKKDIRLIYLALHHIMKHRGHFLFSGTVENATSFQCAYDNMVRCLEDEFDMTLSCDDRDELSKIIRDKRITKRDKASRILSLWHCEDEDRQKQWKAMIGMICGSKVKLAEVFADDTLKEADRPSISFADTSYDEIYPELEEILQERCGILDILKGVYDWGILADILKGGEYDGNSYLSIAKVGIYEKHKKDLRCLKSVLRDFANDTYRDFFQRPGKDNYCAYIGTTLRNGKKSSSKRCSYDDFKKATKKILEGIQAEDGDERIDYILEELEQGTFLPLQVSKENSVIPHQVHAMECRAILQNAEKHYDFLREKDEKGRTVSERIVQLFEFRIPYYVGPLNTSNKGNSWMIRKEGAEGRIDPWNFEEMVDTNASAEQFIRRMTNKCTYLRGEDVVPKYSLLYSEFMVWNELNNVKIRSEKLPTEMKTRIFDEVFQKNKKITGKTLLTYLQCEGIEVEASDLSGFDQTFKSSLTSYLDMKKIFGEEIQKFSCREMAEDLILWITLYGDAPKMLRQVIRNHYGEDRLSEEQLKKVCRLKYQGWGRLSKKFLNGIEGVSVETGETFTILRALRETNDNLMQILSSNYTFSKEIEAINKEKFQNIVSFSYDNIMKDTVASPAIKRAAWQVLLIAEEVRKIMGKEPLKIFVEMARGPEEKKATTSRQQRLLQLYAKIKDESREWKAELENRKESDFRSIKLYLYYTQMGKCMYSGKSLDLSQLANLEVCDRDHIYPQSKTKDDSLDNLVLVCSEYNRAKGDGMIKPEWQKKMTPFWQMLKNKGLISENKFRRLTRQTPLTDEELAGFINRQLVETRQSSKVVTELFQRLYENSQVVYVKAKAVSDFRHQTLEMVKCRSINDYHHAHDAYLNIVVGNVYHEKFTSNPLRWLREKKDYNYSLNRMFDWNLERRGRIIWEKGKKGTIQTVRHYMKQKDIRYTRYATENKSGQNGGLFDSQIVGKNENASIPIKKGMDVKKYGGYKTITPAYFALVQSVDKKGKLQKSVEAVPLYLKREVENNPERYLEYCRQEYGLKEPKILIPRIKKDSLFRINGFPMHLRGRQDTRLLLQGAVQLILDKDYEVYYKKIEKYLQRDQQNARERLSITERDEITSERNLWLYDELYRKQSETIYRYRPNSQCRILADGRERFLELSCEEQCAVLNEILHLLQCKSIMANLKMVGGSGLAGKILVNKVITKCNEAKLIHQSVTGLFEQEIDLLAL

SEQ ID NO: 940 - protein, 1353 aa, synthetic construct
  REGION 1..1353: note = MG46-44 effector
MDLQKDYYLGLDCGTGSVGWAVTDTDYRVLAFRGKSMWGSRLFETALTAADRRMNRCARRRYLRSKQRIDLLDELLEEEIAKTDPEFIQRVKDSSYKKSDKTEVQKNSLFNDKKFKDNDFFNKYPTIFHLRKALIDNPPDDIRFLYLAIHHILKNRGHFLFPGQSLSSIQSLKPLLEKMCCLSEDELGVSIYINDYEEAERCIKEYKGNQRVFKLEEIITTSDSKVLKKILKTLSGQKVNASDLFDNEELIIDGQEIKIDFQKADFETAELVALEDLLSEESYLLLEQLKGIFDWSLLSRVMAGCVYLSDAKINQYNDNKVDLKNLKYIYKTYFTEKEYEEFFHSEKLNTFSSYIGGMYDQRIKLSVRRTKMDDFYKVVKKMIESCASAKNDPIGQQILNKIADGSFFNLLISSRNSLIPYQVHYMELAKILENAEKQFSFLTVKDDDGLTISDKIKSIMTFRIPYYVGPLVDVSKPENARKFAWMTRKSEGKIYPWNFEEKVDIATSATNFITKMVNNCTYLPNEKVLPKNSLLYSEFMVLNELNNLKINSEKPSVEQKQEIVEKLFKKYKKVTQKRLLEFIKTEGWYPNNTQLQITGIDGDFKTSLTSYIAFKNYLNNHVLSKAEVEEIIFYNAVFESGGSILEDKITTLIGDKVSNEDLKKILAIKFKGWGRFSRKFLECLDGTELATGEVHSIMYFLQNTNKNLMELLSKDYDFLEGIEELQTGAIENLDYSCVEQLSISPSVKRQIWQTLKIVKEVEKIMGSQPKKVFMEFAREEREKVRTVSRRDNLLKLYDSLVNPSEEDLELKRKIVNCTDTQLAKNDRLFLYYTQLGRCMYSGKPIDISELTNSNIYDIDHIIPQSKIKDDSLNNKCLVLRTINNGVKNDIYPITDSIQNTQKQFWKHLLDCHLINENKYNRLIRTKQLSESELSDFINRQLIETQQSTKACASILKQYFKEGTKIVYSKAGNVSDFKNEYFIPKVRIINDLHHAKDAYLNIVVGNCFDTKFSRPGFIQSHEQYNLSHVFKYSINGAWDKDKTIKLVKEQLDNNDIRFTRQTFCKSGQLFDLMPLKGNEKNGMIPRKSSDPKLVELLSKAEDKDKCIEDWVKQYGGYNSLAISYFALIKYTEKKKDKAVIISIPVMLANQIKTDDELLAYASNKLKFANPRIIIRKILVNTLFEYNGFRLHLSGKAGSSIVFKNATPLYLTKDLEKYTKNLEKVNNRKKRFPNTFKLYPEEDKISKEENLLLYDELTRKLGIKPFSNRPGGFFEKLQNGRSLFIELNCEEQVFELIEILQLFGTNSTLSNLSAIGCAKTAGGINISPNLDISKNKYVIINQSVTGLFEKTERLG

SEQ ID NO: 941 - protein, 1344 aa, synthetic construct
  REGION 1..1344: note = MG46-45 effector
MKLEEIDYYLGLDCGTSSVGYAVTDKDYNLLKARHKDMWGSHLFDEAETAEGRRIQRNARKRLQRRKERIKLLQSIFAEEIAPIDPTFFLRLNESSLWEEDRSSENKQSFSLFNDSGFTDKDYFKKYKTIYHLRSDLVSSTEERDPRLIYLALHHIVKNRGHFLFPGDSFSSVTDISPVLDALKESYYSVFDEELTIPDNNSIVDCLYEKVKSIRVEKLKASIFSENDKRKTNLVKAIVGYKIQAKNLFENEEYEELPAIEFSNNSFEENSLPTLEESLSDDEYKLIESLKALYDWALLSSIMSGKRFISEAKVELYEKNKRDLKDLKDLVKEYAPESYQDLFHGDKESFSNYIGFNRTNKKSQNKRVKRVSTENFYKKVKKILGTIVTDDPRKTRILEDIENDNFLVLLRSFRNGVIPYQVNKAEMEQILENASTYLPWLKVRDKDGNTPKSKILSILTFRIPYYVGPLNGHNNKNYWMIRKDDGKIYPWNFDKKVDEIASAESFIQRMTNKCTYLPTEDVVAKQSLLYQKFMVLNEINNIKINGEDISVEQKQDIYSLFKQGNVTRKKIEKLAVSKCWVQNGESISIDGIDETIKSKLSSYLTFKDYLESGKLTEADVDTIIYYLTLFSDGGKIVKSKLSSLFKDKLSEKELDKISRLKFSGWGNLSKKFLAGIEAMNPETGELTNIIGLLWDTNYNLMELIHNEATGIQNALNNKKQIPSLSYELLDEYRLSPKVKRQIWQALKIVKEIEKIMGHKPNKIFIETTRSNSSKKKGKRDESREDKLRKLLKDDTDSEIKEIYNILESNSKDTGKITSRNKRDKFYLYLTQLGKCMYSGEKIEIANLFTADYDVDHIYPYSKSKDDSLTNKVIVKSNLNREKSNIYPISEGIINKMTPFWKKLESMELIPSEKLYRLTRRTPLTDKELQDFINRQIVETSQTTVTLARILKNYYGESKVVYSKAGNVSKFREDKKIFKSRTINDLHHARDAYLNIVVGNTLNTKYTSKFFLQEQNRDDSNSFNFNFNSNVEGAWMADNNTSMNVVKATMEKNTVLFTKQPEMRTGKLFEVKLKSKGQELGMIPSKMSDYYKAGASLFKEWTDKYGGYNSLAISHFSLVKHKEKKSYVYTFVSIPMIRAKELLNRENLEKYCKDELMYEDFEIVREKVLFNTLLSVDGFLMTITSSDSGGDKICLESAVPLLLNNDLTEKVKKLVKHAKKTKDKNVIGYEDLDGISKSSNEKIYELLLKKAKLPIYKSRPANAIKVLESGYERFKNLTLEDQISALTSILDYFGMRNGIADLQLVGGKANSGKIRIQATVNPSKKRVFIIDQSITGIYDSWFELK

SEQ ID NO: 942 - protein, 1351 aa, synthetic construct
  REGION 1..1351: note = MG46-46 effector
MNLKEIPYYVGLDCGTSSVGFAVTDKNYNLLKAKNKDMWGSHLFDEANTAEARRIQRNARKRLARRNERIKLLQSIFAEEIAKIDPTFFIRLNESSLYQEDRSKDNDQPFSLFNDKDYTDKDFKIDFPTIYHLRAALLDGSITKKDPRFVYLALHHIVKNRGHFLFPGESLASIQNIGTILQALKECSSSIFEEDLTFGSQNLIEDALKIKKKTERIETLKSLIFSNNDKRKLLIIKAIAGYSIQPKNLFENDEYDELPKLEFQKSSFEEQDLPKLEETLQEDEYKFVESLKALYDWSLLANIMAGKDSISKAKIDQYNKNKQDLTVLKKVIRKYFTKEEYEAFFHSNKEGSFSNYIGSINSKHLAKGPEHKTRKRVKRTNTDVFYAEVKKTLKKITVEDSDVNQILSDIENDNFLPLLRSFRNGVVPFQVNLAELKGILEKSEGYLPWLEKKDEDGLSAEDKIISIMKFRIPYYVGPLADPSKNRNAWLARKESGRILPWNFEKKVDVGESAERFIMRMTNKCTYLPEEDVIPKQSLLYQNFMVLNEINNLKINSEDISVEQKQTIYYKLFRKGNVTQKKIKNLAITEGWVQKGDDLILSGIDDTIKASLSSYIAFAPYLESGKLNQNEVEDIIRWLTLFSDGGDIAKRKIESTFSGKLSKDDIKAISRMKFSGWGNLSKKFLTGIDAIDPETGEYKNIIRLLWDTNYNLMEILHNPECGILEQLGNKEPIDSLNYSILGDLRISPKVKRQIWQALRITKEIEHIMGHKPEKVFIEVARYEGEKGKRTKTRKDQLLEKIKKAKDPDDNEILKSLESEDVSMITKRDRLYLYYTQLGKCMYSGEDIDLDDLLSKKYDIDHIYPYSKSNDDSLTNKVIVKSELNTEKRNDFPIKEDIRIKMNKFWKKLLEKELISSEKYHRLTRNTSLSDEDLKGFINRQIVETSQSTKALAEILKRYFGEETKIVYSKAGNVSDFRKDFDLPKSRIINHLHHAKDAYLNIVVGNTLYCKYTSAWFLKNVNFNNPYKYNVEGAWIADSNKTISLVKATMDKNTVLFTRQPEMRTGQLFDLNPKAKGSEKGMIPLKMIPKLKEQLSKNTNKEEIIKAWTDKYGGYNSLAVSHFALVRHLEKKKQVYTFVKIIVIRAQELLDKENLLKYCVEELGYKDVEIIRTKVLFNTLLSVDDFLMTITNSMNKGATLGNESAIPLILENKYVKYVKKLEKFTNAKRLDKNLLIDEKYDEISREENIELYELLLKKCKLYIMRNRPGNSTGIIERGEEVFTNLPIEQQTQTLMNILNYLSMGNGCTDFSLIGGGKANGTLTLSSTIDPSKKKVCIFDQSITGIYEERLKLE

SEQ ID NO: 943 - protein, 1353 aa, synthetic construct
  REGION 1..1353: note = MG46-47 effector
MNLKEIPYYVGLDCGTSSVGFAVTDKNYNLLKAKNKDMWGSHLFDEANTAEARRIQRNARKRLARRNERIKLLQSIFAEEIAKIDPTFFIRLNESSLYQEDRSKDNDQPFSLFNDKDYTDKDFKIDFPTIYHLRAALLDGSITKKDPRFVYLALHHIVKNRGHFLFPGESLASIQNIGTILQALKECSSSIFEEDLTFGSQNLIEDALKIKKKTERIETLKSLIFSNNDKRKLLIIKAIAGYSIQPKNLFENDEYDEIPKLEFQKSSFEEQDLPKLEETLQEDEYKLVESLKALYDWSLLANIMAGKDSISKAKIDQYNKNKQDLTVLKKVIRKYFTKEEYEAFFHSNKEGSFSNYIGSINSKHLAKGPEHKTRKRVKRTNTDVFYAEVKKTLKKITVEDSDVNQILSDIENDSFLPLLRSFRNGVVPFQVNLAELKEILEKSEGYLPWLEKKDEDGLSAEDKIISIMKFRIPYYVGPLADPSKNRNAWLARKESGRILPWNFEKKVDVGESAERFIMRMTNKCTYLPEEDVIPKQSLLYQNFMVLNEINNLKINSEDISVEQKQTIYYKLFRKGNVTQKKIKNLAITEGWVQKGDDLILSGIDDTIKASLSSYIAFAPYLESGKLNQNEVEDIIRWLTLFSDGGDIAKRKIESTFSRKLSKDDIKAISRMKFSGWGNLSKKFLTGIDAIDPETGEYKNIIRLLWDTNYNLMEILHNPECGILEQLGNKEPIDSLNYSILGDLRISPKVKRQIWQALRITKEIEHIMGHKPEKVFIEVARYEGEKGKRTKTRKDQLLEKIKKAKDPDDNKILKSLESEDASMITKRDRLYLYYTQFGKCMYSEEDIDLDDLLGKCNKYDIDHIYPYSKSNDDSLTNKVIVKSELNREKSNDFPIKEDIRIKMNKFWKKLLEKKLISSEKYHRLTRNTSLSDEDLKGFINRQIVETSQSTKALAEILKRYFGEETKIVYSKAGNVSDFRKDFDLPKSRIINHLHHAKDAYLNIVVGNTLYCKYTSAWFLKNVNFNNPYKYNVEGAWIADSNKTISLVKATMDKNTVLFTRQPEMRTGQLFDLNPKAKGSEKGMIPLKMIPKLKEQLSKNTNKEEIIKAWTDKYGGYNSLAVSHFALVRHLEKKKQVYTFVKIIVIRAQELLDKENLLKYCVEELGYKDVEIIRTKVLFNTLLSVDGFLMTITGSSSGDSQLSLESAIPLILENKYVKYVKKLEKFTNAKRLDKNLLIDEKYDEISREENIELYELLLKKCKLYIMRNRPGNSTGIIERGEEVFTNLPIEQQTQTLMNILNYLSMGNGCTDFSLIGGGKANGTLTLSSTIDPSKKKVCIFDQSITGIYEERLKLE

SEQ ID NO: 944 - protein, 1351 aa, synthetic construct
  REGION 1..1351: note = MG46-48 effector
MYPDYFIGIDAGTDSVGWAVTDEQYNILKFGKKAMWGIRLFDEANPAAERRLYRTQRRRYGRRVQRTKLLQELFAEEIAKKDPGFFLRMKESKYLPEDRKYDFKYLLFNDDNYTDSNFHKEYPTVYHLRKAFLDGKNINDPRLLYLAVHHIIINRGHFLFDGVNVENVTKFETVFNSLVEYINDNFDTESDIKKITNIDTAEFSKILKSKDTVTAKKKKLYELFGVKKGQLKAVCDLLAGSSSVKLSELFDNETLDSAEKNKITFSGSSYQDEHDSYEEVLDDGVIFIDLLKSVYDWSVLADILGDNAYISQSKVKSYDKHGDDLKLLKKVINRHCRDKYFDFFKSDKNDKNYCAYSGMCKIGGKKKEIKRVKQDDFYAEIKKMLKPFDDDNDVKIILADIETKSFLPKQISPDNCAIPYQLNEFELKRILLNAEKNFPFLKEKDESGIAVNDKIMKLLTFRIPYYVGPVNDEHKGENSNCWMVRSDNSKDRITPWNFENKVDIEQSAQEFILRMTNKCTYLYGEDVLPKNSLLYSEYEVLNELNNLSLNGERLNVEDKKDIIEKIFKQKNKVKIKDIVNYYCSLGKEVSADDFSGLADMKEFKSSLKSYRDFDKILGDRFNYNFVEEAILAVLLFSGDKKILTSRLKKIGSGYFTDDEIKKISSLRYSDWGRFSKKLLTGIYSVYSQTGEYMNIITAMRETTCNFMETQGQNFGFKDEIQKINSEVMPKINDFSYDALVKDLYVSPKIKRSVWQTLLIVREIVKITGHEPKKIFIEMARGSDGTSKTPDSRKNRLLELYKKCGEDSGVLYDSLSKHTDSDLRKTALYLYYTQMGKCMYSGEDIELDDLFNKNIYDIDHIYPQSKTKDDSLDNKVLVKKKLNLDKSDKFPIPSHIITDKARENWIACKNAGLISKEKYERLTRKTELTADELAGFINRQLVETRQSTKAVAGIFTEMFPDTLIVYAKASNADVFKKHFDIPKVREVNDYHHARDAYVNIVVGNVFDVKFTRNAVRFIKSGKQYSLNECMYNYPVGNKDNPAWIPGDDGTIATVKKTCSKENILYTRMPYTQGGTLYDVQLLKKGKGQFPAKPGDCHFDGQTNEEIINKYGGYNKIKGAYFCLVEHMDKKNKRVRSIEYVPVYLADSIEKNPSLLEKYVSETLGLKDADVRIRRIKMDSLFSYNGFLMNLSGRTGDRLLFKSAVQLKLNSGDYKYLKNIVKFHDRQRIMKNTLTVSDFDDITKDKNLELYDVLLSKLKDSVYCTVYLAPLKLLTEKREKFISLSVELQAELLYNALHLFQCNRVNSDLSLLGGSPNSGIILIQKTVTDKNKECLINQSPTGLFENKIDLKTI

SEQ ID NO: 945 - protein, 1344 aa, synthetic construct
  REGION 1..1344: note = MG46-49 effector
MKLEEIDYYLGLDCGTSSVGYAVTDKDYNLLKARHKDMWGSHLFDEAETAEGRRIQRNARKRLQRRKERIKLLQSIFAEEIAKIDPTFFLRLNESSLWEEDRSSENKQSFSLFNDLDFTDKDYFKKYKTIYHLRADLASSAEERDPRLIYLALHHIVKNRGHFLFPGDSFSSVTDISPVLDALKESYYSVFDEELTIPDNNSIVDCLYEKVKSIRVEKLKASIFSENDKRKTNLVKAIVGYKIQAKNLFENEEYEELPAIEFSNNSFEENSLPTLEESLSDDEYKLIESLKALYDWALLSSIMSGKRFISEAKVELYEKNKRDLKDLKDLVKEYAPESYQDLFHGDKESFSNYIGFNRTNKKSQNKRVKRVSTENFYKKVKKILGTIVTDDPRKTRILEDIENDNFLVLLRSFRNGVIPYQVNKAEMEQILENASTYLPWLKVRDKDGNTPKSKILSILTFRIPYYVGPLNGHNNKNYWMIRKDDGKIYPWNFDKKVDEIASAESFIQRMTNKCTYLPTEDVVAKQSLLYQKFMVLNEINNIKINGEDISVEQKQDIYSLFKQGNVTRKKIEKLAVSKCWVQNGESISIDGIDETIKSKLSSYLTFKDYLESGKLTEADVDTIIYYLTLFSDGGKIVKSKLSSLFKDKLSEKELDKISRLKFSGWGNLSKKFLAGIEAMNPETGELTNIIGLLWDTNYNLMELIHNEATGIQNALNNKKQIPSLSYELLDEYRLSPKVKRQIWQALKIVKEIEKIMGHKPNKIFIETTRSNSSKKKGKRDESREDKLRKLLKDDTDSEIKEIYNILESNSKDTGKITSRNKRDKFYLYLTQLGKCMYSGEKIEIANLFTADYDVDHIYPYSKSKDDSLTNKVIVKSNLNREKSNIYPISEGIINKMTPFWKKLESMELIPSEKLYRLTRRTPLTDKELQDFINRQIVETSQTTVTLARILKNYYGESKVVYSKAGNVSKFREDKKIFKSRTINDLHHARDAYLNIVVGNTLNTKYTSKFFLQEQNRDDSNSFNFNFNSNVEGAWMADNNTSMNVVKATMEKNTVLFTKQPEMRTGKLFEVKLKSKGQELGMIPSKMSDYYKAGASLFKEWTDKYGGYNSLAISHFSLVKHKEKKSYVYTFVSIPMIRAKELLNRENLEKYCKDELMYEDFEIVREKVLFNTLLSVDGFLMTITSSDSGGDKICLESAVPLLLNNDLTEKVKKLVKHAKKTKDKNVIGYEDLDGISKSSNEKIYELLLKKAKLPIYKSRPANAIKVLESGYERFKNLTLEDQISALTSILDYFGMRNGIADLQLVGGKANSGKIRIQATVNPSKKRVFIIDQSITGIYDSWFELK

SEQ ID NO: 946 - protein, 1224 aa, synthetic construct
  REGION 1..1224: note = MG46-50 effector
MENKKRVYPDYFIGIDAGTDSVGWAVTDEQYNILKFGKKAMWGIRLFDEANPAAERRLYRTQRRRYGRRVQRTKLLQELFAEEIAKKDPGFFLRMKESKYLPEDRKYDFKYLLFNDDNYTDSNFHKEYPTVYHLRKAFLDGKNINDPRLLYLAVHHIIINRGHFLFDGVNVENVTKFETVFNSLVEYINDNFDTESDIKKITNIDTAEFSKILKSKDTVTAKKKKLYELFGVKKGQLKAVCDLLAGSSSVKLSELFDNETLDSAEKNKITFSGSSYQDEHDSYEEVLDDGVIFIDLLKSVYDWSVLADILGDNAYISQSKVKSYDKHGDDLKLLKKVINRHCRDKYFDFFKSDKNDKNYCAYSGMCKIGGKKKEIKRVKQDDFYAEIKKMLKPFDDDNDVKIILADIETKSFLPKQISPDNCAIPYQLNEFELKRILLNAEKNFPFLKEKDESGIAVNDKIMKLLTFRIPYYVGPVNDEHKGENSNCWMVRSDNSKDRITPWNFENKVDIEQSAQEFILRMTNKCTYLYGEDVLPKNSLLYSEYEVLNELNNLSLNGERLNVEDKKDIIEKIFKQKNKVKIKDIVNYYCSLGKEVSADDFSGLADMKEFKSSLKSYRDFDKILGDRFNYNFVEEAILAVLLFSGDKKILTSRLKKIGSGYFTDDEIKKISSLRYSDWGRFSKKLLTGIYSVYSQTGEYMNIITAMRETTCNFMETQGQNFGFKDEIQKINSEVMPKINDFSYDALVKDLYVSPKIKRSVWQTLLIVREIVKITGHEPKKIFIEMARGSDGTSKTPDSRKNRLLELYKKCGEDSGVLYDSLSKHTDSDLRKTALYLYYTQMGKCMYSGEDIELDDLFNKNIYDIDHIYPQSKTKDDSLDNKVLVKKKLNLDKSDKFPIPSHIITDKARENWIACKNAGLISKEKYERLTRKTELTADELAGFINRQLVETRQSTKAVAGIFTEMFPDTLIVYAKASNADVFKKHFDIPKVREVNDYHHARDAYVNIVVGNVFDVKFTRNAVRFIKSGKQYSLNECMYNYPVGNKDNPAWIPGDDGTIATVKKTCSKENILYTRMPYTQGGTLYDVQLLKKGKGQFPAKPGDCHFDGQTNEEIINKYGGYNKIKGAYFCLVEHMDKKNKRVRSIEYVPVYLADSIEKNPSLLEKYVSETLGLKDADVRIRRIKMDSLFSYNGFLMNLSGRTGDRLLFKSAVQLKLNSGDYKYLKIL

SEQ ID NO: 947 - protein, 1346 aa, synthetic construct
  REGION 1..1346: note = MG46-51 effector
MNKQEYFLGLDLGTGSVGWCVTDTDYQILKKNRKPAIGSVLFSTAETAKGRRTVRCARRRLRRQQERIRCLQELFAEEMGKVDEGFFHRLAESPYVREDKRNADGTMPTLPYALFVDQDYTDKEYHRQYPTIYHLRKELMDHVSAHDIRLVYLAVAHILKHRGHFLSNIDVNGQGESFEELMLQFLNTWNSFFDLEIFLQTDEMENLKAVLLDPGITKTEKKAQIVALMQTKEKQVKELAALLVGASVSLDKLFDQEAYKNLEESKLQFDSASYEEKEGYYQEALGDSFELIARAKAVYNWCALSRILKNNPHGRISDAKVADYEKHKKDLQLLKKVLKEKFPPEVRKKILNESQKGLANYPAYIGMTRHNGRKEVIEGHCSREDFYKLLDKEVLKNLKDCEEKAYIQQQITLGQFLPKQKGSDNSVIPYQIHEKELKQILKNAEEYLPFLKEKDESGFTVSEKILQLLTFRIPFYVGPLNNAHQKEGYAWVVRREKGKVYPWNFEQKVDLEKSAEEFILRATNKCTYLKKEEVLPAGSLLFEKYKVLNELNTVKIQGVRLTVSIKQKVYEDLFCHHQRVTRKRLVQYLKKEGYYEDIGPEDISGIDQDFQSSMRSLLAFKQIHFDTHVSDSVMEDMIRDITLFGADQKLLKKRLLTKYPAYEKQIPAIVKTVKCDGWAPFSRKLLEGLAVETKEGEPIGTILYYLWNEQLNFNEILFQPQYGFQRLIQQENDDLTEKTDGIRYELVENLYVSPSVRRQIWMALKVIDEVQSFMGRAPKRVFVEMAREKQESKRTSDRKSQILQLYAYTKVNKELLEELKGCTNEELRKDKLFFYFMQMGRSAYTGDPIPFSALSDNSLYDIDHIYPRSLTADDSLDNRVLVEAKYNREKKQDKYPIDKKDRDRMAGIWRMWHEKKYISDEKYYRLTRATELTQDELCGFVNRQLVETRQSTKALTELLHQLMPDKTEIVYVKARHVVNFRHRFDLLKVRDLNDFHHGQDAYLNIVVGNIFHLKFTKDVRKYFQEKGTHRTYNLYKMFDYDVEFQGEKAWVSGQTIHTVKTMMENSKVMTVRQTYEEKGELYDLQRMKRGKGQVPLKESGRISDIEKYGGYNKATNTYFMLVKAEDKKGKSGTWLLPVPLYLKNRIEDYNEYAKEYFEQEYQLKQVEILRKVKMQTLFIYQGFKMRLAGRSGSQLVFHNANQLILPRKYHQTIRQISKHMLELQKDKRALLPDNQLLKESDMDELYLELCRKLKDSIYQVMLGRFLDTYESGYRRYQELSIEKKAEALYQMLKLFQCTPEMPNLTLIGGNAKPGPIRIGMNVTDRSSLAIVHQSVTGIYEQIERII

SEQ ID NO: 948 - protein, 1346 aa, synthetic construct
  REGION 1..1346: note = MG46-52 effector
MNKQEYFLGLDLGTGSVGWCVTDTDYQILKKNRKPAIGSVLFSTAETAKGRRTVRCARRRLRRQQERIRCLQELFAEEMGKVDEGFFHRLAESPYVREDKRNADGTMPTLPYALFVDQDYTDKEYHRQYPTIYHLRKELMDHVSAHDIRLVYLAVAHILKHRGHFLSNIDVNGQGESFEELMLQFLNTWNSFFDLEIFLQTDEMENLKAVLLDPGITKTEKKAQIVALMQTKEKQVKELAALLVGASVSLDKLFDQEAYKNLEESKLQFDSASYEEKEGYYQEALGDFFELIARAKAVYNWCALSRILKNNPHGRISDAKVADYEKHKKDLQLLKKVLKEKFPPEVRKKILNESQKGLANYPAYIGMTRHNGRKEVIEGHCSREDFYKLLDKEVLKNLKDCEEKAYIQQQITLGQFLPKQKGSDNSVIPYQIHEKELKQILKNAEEYLPFLKEKDESGFTVSEKILQFLTFRIPFYVGPLNNAHQKEGYAWVVRREKGKVYPWNFEQKVDLEKSAAEFILRATNKCTYLKKEEVLPAGSLLFEKYKVLNELNTVKIQGVRLTVSIKQKVYEDLFCHHQRVTRKRLVQYLKKEGYYEDIGPEDISGIDQDFQSSMRSLLAFKQIHFDTHVSDSVMEDMIRDITLFGADQKLLKKRLLTKYPAYEKQIPAIVKTVKCDGWAPFSRKLLEGLAVETKEGEPIGTILYYLWNEQLNFNEILFQPQYGFQRLIQQENDDLTEKTDGIRYELVENLYVSPSVRRQIWMALKVIDEVQSFMGGAPKRVFVEMAREKQESKRTSDRKSQILQLYAYTKVNKELLEELKGCTNEELRKDKLFFYFMQMGRSAYTGDPIPFSALSDNSLYDIDHIYPRSLTADDSLDNRVLVEAKYNREKKQDKYPIDKKDRDRMAGIWRMWHEKKYISDEKYYRLTRATELTQDELCGFVNRQLVETRQSTKALTELLHQLMPDKTEIVYVKARHVVNFRHRFDLLKVRDLNDFHHGQDAYLNIVVGNIFHLKFTKDVRKYFQEKGTHRTYNLYKMFDYDVEFQGEKAWVSGQTIHTVKTMIASSKVLTARQTYEEKGELYDLQRMKKGKGQVPLKESGRISDIEKYGGYNKATNTYFMLVKAEDKKGKSGTWLLPVPLYLKNRIEDSNEYAKEYFEQEYQLKQVEILRKVKMQTLFIYQGFKMRLAGRSGSQLVFHNANQLILPRKYHQTIRQISKHMLELQKDKRALLPDNQLLKESDMDELYLELCRKLKDSIYQVMLGRFLDTYESGYRRYQELSIEKKAEALYQMLKLFQCTPEMPNLTLIGGNAKPGPIRIGMNVTDRSSLAIVHQSVTGIYEQIERII

SEQ ID NO: 949 - protein, 1346 aa, synthetic construct
  REGION 1..1346: note = MG46-53 effector
MNKQEYFLGLDLGTGSVGWCVTDTDYQILKKNRKPAIGSVLFSTAETAKGRRTVRCARRRLRRQQERIRCLQELFAEEMGKVDDGFFHRLAESPYVREDKRNADGTMPTLPYALFVDQDYTDKEYHRQYPTIYHLRKELMDHVSAHDIRLVYLAVAHILKHRGHFLSNIDVNGQGESFEELMLQFLNTWNSFFDLEIFLQTDEMENLKAVLLDPGITKTEKKAQIVALMQTKEKQVKELAALLVGASVSLDKLFDQEAYKNLEESKLQFDSASYEEKEGYYQEALGDFFELIARAKAVYNWCALSRILKNNPHGRISDAKVADYEKHKKDLQLLKKVLKEKFPPEVRKKILNESQKGLANYPAYIGMTRHNGRKEVIEGHCSREDFYKLLDKEVLKNLKDCEEKAYIQQQITLGQFLPKQKGSDNSVIPYQIHEKELKQILKNAEEYLPFLKEKDESGFTVSEKILQLLTFRISFYVGPLNNAHQKEGYAWVVRREKGKVYPWNFEQKVDLEKSAEEFILRATNKCTYLKKEEVLPAGSLLFEKYKVLNELNTVKIQGVRLTVSIKQKVYEDLFCHHQRVTRKRLVQYLKKEGYYEDIGPEDISGIDQDFQSSMRSLLAFKQIHFDTHVSDSVMEDMIRDITLFGADQKLLKKRLLTKYPSYKKQIPAIVKTVKCDGWAPFSRKLLEGLAVETKEGEPIGTILYYLWNEQLNFNEILFQPQYGFQRLIQQENDDLTEKTDGIRYELVENLYVSPSVRRQIWMALKVIDEVQSFMGGAPKRVFVEMAREKQESKRTSDRKSQILQLYAHTKVNKELLEELKGCTNEELRKDKLFFYFMQMGRSAYTGDPIPFSALSDNSLYDIDHIYPRSLTADDSLDNRVLVEAKYNREKKQDKYPIDKKDRDRMAGIWRMWHEKKYISDEKYYRLTRATELTQDELCGFVNRQLVETRQSTKALTELLHQLMPDKTEIVYVKARHVVNFRHRFDLLKVRDLNDFHHGQDAYLNIVVGNIFHLKFTKDVRKYFQEKGTHRTYNLYKMFDYDVEFQGEKAWVSGQTIHTVKTMIASSKVLTARQTYEEKGELYDLQRMKKGKGQVPLKESGRISDIEKYGGYNKATNTYFMLVKAEDKKGKSGTWLLPVPLYLKNRIEDYNEYAKEYFEQEYQLKQVEILRKVKMQTLFIYQGFKMRLAGRSGSQLVFHNANQLILPRKYHQTIRQISKHMLELQKDKRALLPDNQLLKESDMDELYLELCRKLKDSIYQVMLGRFLDTYESGYRRYQELSIEKKAEALYQMLKLFQCTPEMPNLTLIGGNAKPGPIRIGMNVTDRSSLAIVHQSVTGIYEQIERII

SEQ ID NO: 950 - protein, 1346 aa, synthetic construct
  REGION 1..1346: note = MG46-54 effector
MNKQEYFLGLDLGTGSVGWCVTDTDYQILKKNRKPAIGSVLFSTAETAKGRRTVRCARRRLRRQQERIRCLQELFAEEMGKVDEGFFHRLAESPYVREDKRNADGTMPTLPYALFVDQDYTDKEYHRQYPTIYHLRKELMDHVSAHDIRLVYLAVAHILKHRGHFLSNIDVNGQGESFEELMLQFLNTWNSFFDLEIFLQTDEMENLKAVLLDPGITKTEKKAQIVALMQTKEKQVKELAALLVGASVSLDKLFDQEAYKNLEESKLQFDSASYEEKEGYYQEALGDFFELIARAKAVYNWCALSRILKNNPHGRISDAKVADYEKHKKDLQLLKKVLKEKFPPEVRKKILNESQKGLANYPAYIGMTRHNGRKEVIEGHCSREDFYKLLDKEVLKNLEDCEEKAYIQQQITLGQFLPKQKGSDNSVIPYQIHEKELKQILKNAEEYLPFLKEKDESGFTVSEKILQLLTFRISFYVGPLNNAHQKEGYAWVVRREKGKVYPWNFEQKVDLEKSAEEFILRATNKCTYLKKEEVLPAGSLLFEKYKVLNELNTVKIQGVRLTVSIKQKVYEDLFCHHQRVTRKRLVQYLKKEGYYEDIGPEDISGIDQDFQSSMRSLLAFKQIHFDTHVSDSVMEDMIRDITLFGADQKLLKKRLLTKYPAYEKQIPAIVKTVKCDGWAPFSRKLLEGLAVETKEGEPIGTILYYLWNEQLNFNEILFQPQYGFQRLIQQENDDLTEKTDGIRYELVENLYVSPSVRRQIWMALKVIDEVQSFMGRAPKRVFVEMAREKQESKRTSDRKSQILQLYAHTKVNKELLEELKGCTNEELRKDKLFFYFMQMGRSAYTGDPIPFSVLSDNSLYDIDHIYPRSLTADDSLDNRVLVEAKYNREKKQDKYPIDKKDRDRMAGIWRMWHEKKYISDEKYYRLTRATELTQDELCGFVNRQLVETRQSTKALTELLHQLMPDKTEIVYVKARHVVNFRHRFDLLKVRDLNDFHHGQDAYLNIVVGNIFHLKFTKDVRKYFQEKGTHRTYNLYKMFDYDVEFQGEKAWVSGQTIHTVKTMIASSKVLTARQTYEEKGELYDLQRMKKGKGQVPLKESGRISDIEKYGGYNKATNTYFMLVKAEDKKGKSGTWLLPVPLYLKNRIEDYNEYAKEYFEQEYQLKQVEILRKVKMQTLFIYQGFKMRLAGRSGSQLVFHNANQLILPRKYHQTIRQISKHMLELQKDKRALLPDNQLLKESDMDELYLELCRKLKDSIYQVMLGRFLDTYESGYRRYQELSIEKKAEALYQMLKLFQCTPEMPNLTLIGGNAKPGPIRIGMNVTDRSSLAIVHQSVTGIYEQIERII

SEQ ID NO: 951 - protein, 1347 aa, synthetic construct
  REGION 1..1347: note = MG46-55 effector
MKKQDYFLGLDLGTGSVGWCVTDMEYHILKENRKPAIGSVLFSTAETAKGRRIVRCARRRLKRQQERIRCLQELFAEEIRKVDAGFFHRLSESPYVKADKQNEDGSKPELPYALFVDPDYTDKEYHQQYPTIYHLRKELMDNASVHDIRLVYLAAAHILKHRGHFLSNIDVNGRGVSFEELIGQLLNTWNSIFDQGLSLQAEELENLKEILQDSGITKTEKKTQIIALLKTKEKQMKELAALLTGSSVSLDKLFGREEYKNLEENKLQFDAASYEEKEGYYQEVLGDSFELITNARAVYNWCALSRILKNNPQGRISDAKVADYEKHKKDLQILKKILRENCPEDIQKKILSVSQKGLANYPAYIGMTKHNGKKMVIEDRCSKEDFYKLLEKEILADMEDCEEKTYICQQIALGQFLPKQKGSDNSVIPYQIHEKELKRILKNAEGYLPFLKKKDASGFTVSEKILQLLTFRIPFYVGPLNNTYQKNSYAWVARREKGKIYPWNFEQKVDLEKSAEEFILRMTNKCTYLRKEDVLPAGSLLFEKYKVLNELNTVKIRGERLPVPVKQKVYEDLFCHHQRITRKRLGQYLKKEGYYEDIGPENISGLDQDFQASLKSMLAFKQIHFDSPVPEWIIEDIIRDITLFGADPKLLKNRLSVKYPSYEKQIPVIVKNVKCDGWAPFSRKLLEGLAVETDEGEPVGTIMYYLWNGQQNFNEILYQPRYGFQKLIEQENQDITGKSDSIRYELVEDLYVSPAVRRQIWMALKVIDEVQGFMGQPPKRIFVEMAREKQESKRTSDRKSQILELYAHTKVDADLLDELKGCTNEELRRDKLFFYFTQMGRSAYTGKRIPFSALSDNSLYDIDHIYPRSLTADDSLDNRVLVEARLNREEKQDKYPIEKKYRDKMAGDWKIWHERKYISDEKYRRLTRTTELTHDELCSFVNRQLVETRQSTKALTELLHRLMPKDSTEIVYVKAKHVVDFRHKFDLLKVRDLNDFHHAQDAYLNIVVGNVFHLKFTKDVRKYFAEKGSYRTYNLYRMFENDVEYQGERAWDKEETIRTVKEMMANSRILTARQTYEEKGELYNLQRMKKGKGQVPLKEGGRIADIEKYGGYNKATNTYFMLTRAEDKKGRSSVWILPVPLYRKNKIESSREYAKAYFEQEYQLNQVEILRKIKMQTLFVYQGFKMRLAGRSGSQLVFHNANQLMLPREYHQTIRQISKHMLELQKDKRALLPDNQLLKEEDMDKLYLELCRKLQESIYRVMLGRFSDTYESGYKRYQELSREKKAEALYQMLKLFQCTPELPNLTLIGGTGTQGAIRIGMNVTDRKSLAIIHQSVTGIYEQIERIV

SEQ ID NO: 952 - protein, 1351 aa, synthetic construct
  REGION 1..1351: note = MG46-56 effector
MKKHQDYFLGLDLGTGSVGWCVTDTEYRILKANRKRTIGTVLFSTAETAKERRTLRCARRRLRRQKERLLCLQELFREEIEKVDPGFFFRLQESPYAVEEKQNPDGSRAELPYALFVDKDYTDKEFHAQYPTIYHLRKELMDNPLPHDARLVYLAAAHIIKHRGHFLSSISAEGKEASFEELLSQFTQLWNEYMDHTLTLSEGEKGKLKETLLDAGMTKSGKKTAIIRLLGTKEPQPKEMAALLTGASASIEKLFDKEEYKNLEENKIQFDAPSYEEKEEYYREALGDDFEIVARARAIYNWCALSKILKNNPGGRISDARVEDYERHRTDLQLLKKLLSENFPKETQERILKVSEKGLANYPAYIGMTKKNGKKVPVVERCSKEDFYKLLDKEILKNLGDSEEKAYMEQQIRLGGFLPKQKGNGNSVVPYQLHEKELKLILKNAEGYLPFLKEKDESGYTVSEKILQLLTFRIPYYVGPLYGGGGGHSYAWVKRLEDGKVYPWNFEQKIDVEKSAEEFIRRAVSTCSWLKNEKVLPAGSLLFEKFKVLNELNNVRIYGERLEVDIKQRIYQELFCRHLRITKKRLIQYLKKEGIYAKVEPEDISGLDENFQSSLKSLLAFKQIHFDSPVPEQAMEDMIKDITLFGEDPKLLKKRLLVKYPEYGKQIPAIIKTVKCDGWASLSEKLLTGLAVDIPGEGPVGTILYFLWNTRQNLMEILYNPEYAFQDLIKTENGDTGRKDGKISYELVEELYVSPSVKRQIWMALKVIEEVRHFMGCEPKRIFVEMAREKQESKRTSDRKAQIMQLYSAIRTDKDYKELLKELNGCSNDELRKDKLFLYFMQMGRCAYTGKRIPFSDLKYDSLYDIDHIYPRSQTADDSLDNRVLVDAEYNREEKQDLYPIKKETRDEREALWRFWREKKFISDEKYRRLTRATKLTNEELIGFVNRQLVETRQSTKALAEVLNQTKTEQTEVVYVKAKNVTEFRHRYKLLKVRVLNDFHHAQDAYLNIVVGNVYHLKFTKDVRRYFLDKGTYRTYNLTKMFDETVKCGEETAWNKGVSIGTVKEMMKNEKILVSRQTYEEKGKLYDVQRLKKGQGQVPVKESGRMSDISRYGGYGSAKNTYFMLVEAEDKKKKESLWILPVPLYLKQKIESSEEYARSYFEQEYSLCHVRVLKKIRIQTLFVYEGFRMRLAGRSGSQLVFHNANELCLPARHHNTIRQISKHIQELQYDMDAAISDNGLLTEQDLDALYIELCEKLKGSVYQTMLGGYIEKYESGYEKYQKLTLEKKAQALWQMLKIFQCTPEMPDLTLIGGSKSQGAIRMGMNVTGRKSLALIHQSVTGIYERVEKIRG

SEQ ID NO: 953 - protein, 788 aa, synthetic construct
  REGION 1..788: note = MG46-57 effector
MCSYLIREEHISKEEAAQISGIERDFKASLAPWIDMRKILGDNFTVSDSEKIIKDITLFGADKKMLRRRLKARFGYLEDCQVKELVRLPYQGWGRLSKEFLTQILPKAERDSTVLVDQETGEVMNIITALKKTDHNLMELLSGKFGYSAALSEVNTTSVSVCDKAISYKNIQDMRISPAVKRPLWQTLRVIKEIIHIMGKAPSRIFIEMARAEDEKKWKTVSRKDRLLDLYKKCKDEIRNWSADIKKLGEEIKELSDGQLRSDKLYLYYTQMGRSMYTGKPICLGSLMAGADYDIDHIYPRSATGDDSLDNRVLVERTENAKKGDHYPLSIEIQGGRAVFWKVLLDKGFISKEKYRRLTRKTLLTDDEKAGFIGRQLVETRQSTKAIAEILKKAFPETKIIYTKARNVSRFRQYAEFVKVRDMNDYHHAKDAYLNIVVGNAFYTKFTSNPIHFLSERNAVYSLNERTFYQFPIQRGSTMAWEPGDSGTMAVVRKWMDKNNILYTRMPFEEKGGLFDQNILKKGKGQVSLRARGALSDIQKYGGYNNATASYFMLVKAEKNGKIIYLLETVPLHLSGRLESIEDKINFCRELWHRDRKDYKNPVICIPKIYKQSLFEVDGFREHISAKTGNQFVMRNAEQLCLNAESAQIIKNVLKFNQRKQVQKELKVTVHDKITEENLINIFETFISKIQTSIYRNKFEASVGLMIKGKGTFIELSMEDKCKCIGEILHLFQCNPVLSDLQLIGGKKASGRIYMGKRFDGNKKVFLVLQSVTGFFEKKILLAPYEKK

SEQ ID NO: 954 - protein, 1360 aa, synthetic construct
  REGION 1..1360: note = MG46-58 effector
MKEINEYYLGLDMGEGSLGWAVTTPDYHVVKKAGKALWGVRLFESAKTAKERRVFRTGRRRIERRNRRIDFLQELFSEAVCEKDPGFYQRLNDSRLWEEDKTERQINSLFNDVDFTDKSYHKKFPTIYHLRQKLMEDSCEFDVRLVYLAIHHILKHRGHFLLENFEIREDGAVGFEEAMADLGNVLGQFLDRSLPVENNDACKEILKNRKLNKLEKLEQLGKLYDAGGDKSIKEIFRLIMGGTAHLAVIFCDETLKNTERGKISFEDAQYEEYKNDVQTILDDRFDVVAACETLHNWAILAELMGNYKYISDAKVAIFNEHRKDLTVLKRLLKRDSNVYTKMFRMAGKNSYSAYVGLCKIHGKKVPIEKACTQGDFAGEIKKIIKNFPDSEDKKYILDKIERNELLPKAVSKQNGVIPYQLHLVELNKILSNAERYLPFLKKEDEYGTVSDKIRKLFTFRIPYYVGPLNGHSPFAWAVRKDENGHIYPWNFERKIDIEASAEEFIRRMTNKCTYLVKKDVLPKNSLLYTEFMVLNELNNVRIGSAQEKLPPGMKARVWERLFLKDKKITAKKMCSYLIREEHISKEEAAQISGIERDFKASLAPWIDMRKILGDNFTVSDSEKIIKDITLFGADKKMLRRRLKARFGYLEDCQVKELVRLPYQGWGRLSKEFLTQILPKAERDSTVLVDQETGEVMNIITALKKTDHNLMELLSGKFGYSAALSEVNTTSVSVCDKAISYKNIQDMRISPAVKRPLWQTLRVIKEIIHIMGKAPSRIFIEMARAEDEKKWKTVSRKDRLLDLYKKCKDEIRNWSADIKKLGEEIKELSDGQLRSDKLYLYYTQMGRSMYTGKPICLGSLMAGADYDIDHIYPRSATGDDSLDNRVLVERTENAKKGDHYPLSIEIQGGRAVFWKVLLDKGFISKEKYRRLTRKTLLTDDEKAGFIGRQLVETRQSTKAIAEILKKAFPETKIIYTKARNVSRFRQYAEFVKVRDMNDYHHAKDAYLNIVVGNAFYTKFTSNPIHFLSERNAVYSLNERTFYQFPIQRGSTMAWEPGDSGTMAVVRKWMDKNNILYTRMPFEEKGGLFDQNILKKGKGQVSLRARGALSDIQKYGGYNNATASYFMLVKAEKNGKIIYLLETVPLHLSGRLESIEDKINFCRELWHRDRKDYKNPVICIPKIYKQSLFEVDGFREHISAKTGNQFVMRNAEQLCLNAESAQIIKNVLKFNQRKQVQKELKVTVHDKITEENLINIFETFISKIQTSIYRNKFEASVGLMIKGKGTFIELSMEDKCKCIGEILHLFQCNPVLSDLQLIGGKKASGRIYMGKRFDGNKKVFLVLQSVTGFFEKKILLAPYEKK

SEQ ID NO: 955 - protein, 1346 aa, synthetic construct
  REGION 1..1346: note = MG46-59 effector
MNKQEYFLGLDLGTGSVGWCVTDTDYQILKRNRKPAIGSVLFSTADTAKGRRTVRCARRRLRRQQERIRCLQELFAEEIGEVDEGFFHRLAESPYVKEDKRNADGTTPTLPYALFVDLDYTDKDYHRQYPTIYHLRKELMDHVSAHDIRLVYLAVAHILKHRGHFLSNIDVNGQGESFEELMLQFLNTWNSFFDLEIFLQTDEMENLKAILLDPGITKTEKKAQIVALLQTKEKQVKELAALLVGASVSLDKLFDQEAYKNLEESKLQFDSASYEEKEGYYQEALGDSFELIARAKAVYNWCALSRILKNNPHGRISDAKVADYEKHKKDLQILKKVLKEKFPPEVRKKILNESQKGLANYPAYIGMTRHNGRKEVIEGHCSREDFYKLLDKEVLKNLEDCEEKAYIQQQITLGQFLPKQKGSDNSVIPYQIHEKELKQILKNAEEYLPFLKEKDESGFTVSEKILQLLTFRIPFYVGPLNNAHQKEGYAWVVRREKGKVYPWNFEQKVDLEKSAEEFILRATNKCTYLKKEEVLPAGSLLFEKYKVLNELNTVKIQGVRLTVSIKQKVYEDLFCHHQRVTRKRLVQYLKKEGYYKDIGPEDISGIDQDFQSSMRSLLAFKQIHFDTPISDSVMEDMIRDITLFGADQKLLKKRLLTKYPAYEKQIPAIVKTVKCDGWAPFSRKLLEGLAVETKEGEPIGTILYYLWNEQLNFNEILFQPQYGFQRLIQQENDDLTEKTAGIRYELVENLYVSPSVRRQIWMALKVIDEVQSFMGGAPKRVFVEMAREKQESKRTSDRKSQILQLYAHTKVNKELLEELKGCTNEELRKDKLFFYFMQMGRSAYTGDPIPFSVLSDNSLYDIDHIYPRSLTADDSLDNRVLVEAKYNREKKQDKYPIDKKVRDRMAGIWRMWHEKKYISDEKYYRLTRATELTQDELCGFVNRQLVETRQSTKALTELLHQLMPDKTEIVYVKARHVVNFRHRFDLLKVRDLNDFHHGQDAYLNIVVGNIFHLKFTKDVRKYFQEKGTHRTYNLYKMFDYDVEFQGEKAWVSGQTIHTVKTMMANSKVLTARQTYEEKGELYDLQRMKKGKGQVPLKESGRISDIEKYGGYNKATNTYFMLFKAEDKKGKSGTWLLPVPLYLKNRIEDSNEYAKEYFEQEYQLKQVEILRKVKMQTLFIYQGFKMRLAGRSGSQLVFHNANQLILPRKYHQTIRQISKHMLELQKDKRALLPDNQLLKESDMDELYLELCRKLKDSIYQVMLGRFLDTYESGYRRYQELSIEKKAEALYQMLKLFQCTPEMPNLTLIGGNAKPGSIRIGMNVTDRSSLAIVHQSVTGIYEQIERII

SEQ ID NO: 956 - protein, 1346 aa, synthetic construct
  REGION 1..1346: note = MG46-60 effector
MNKQEYFLGLDLGTGSVGWCVTDTDYQILKKNRKPAIGSVLFSTAETAKGRRTVRCARRRLRRQQERIRCLQELFAEEMGKVDEGFFHRLAESPYVREDKRNADGTMPTLPYALFVDQDYTDKEYHRQYPTIYHLRKELMDHVSAHDIRLVYLAVAHILKHRGHFLSNIDVNGQGESFEELMLQFLNTWNSFFDLEIFLQTDEMENLKAILLDPGITKTEKKAQIVALLQTKEKQVKELAALLVGASVSLDKLFDQEAYKNLEESKLQFDSASYEEKEGYYQEALGDSFELIARAKAVYNWCALSRILKNNPHGRISDAKVADYEKHKKDLQLLKKVLKEKFPPEVRKKILNESQKGLANYPAYIGMTRHNGRKEVIEGHCSREDFYKLLDKEVLKNLEDCEEKAYIQQQITLGQFLPKQKGSDNSVIPYQIHEKELKQILKNAEEYLPFLKEKDESGFTVSEKILQLLTFRIPFYVGPLNNAHQKEGYAWVVRREKGKVYPWNFEQKVDLEKSAEEFILRATNKCTYLKKEEVLPAGSLLFEKYKVLNELNTVKIQGVRLTVSIKQKVYEDLFCHHQRVTRKRLVQYLKKEGYYEDIGPEDISGIDQDFQSSMRSLLAFKQIHFDTHVSDSVMEDMIRDITLFGADQKLLKKRLLTKYPAYEKQIPAIVKTVKCDGWAPFSRKLLEGLAVETKEGEPIGTILYYLWNEQLNFNEILFQPQYGFQRLIQQENDDLTERTDGIRYELVENLYASPSVRRQIWMALKVIDEVQSFMGGAPKRVFVEMAREKQESKRTSDRKSQILQLYAHTKVNKELLEELKGCTNEELRKDKLFFYFMQMGRSAYTGDPIPFSVLSDNSLYDIDHIYPRSLTADDSLDNRVLVEAKYNREKKQDKYPIDKKVRDRMAGIWRMWHEKKYISDEKYYRLTRATELTQDELCGFVNRQLVETRQSTKALTELLHQLMPDKTEIVYVKARHVVNFRHRFDLLKVRDLNDFHHGQDAYLNIVVGNIFHLKFTKDVRKYFQEKGTHRTYNLYKMFDYDVEFQGEKAWVSGQTIHTVKTMIASSKVLTVRQTYEEKGELYDLQRMKKGKGQVPLKESGRISDIEKYGGYNKATNTYFMLVKAEDKKGKSGTWLLPVPLYLKNRIEDSNEYAKEYFEQEYQLKQVEILRKVKMQTLFIYQGFKMRLAGRSGSQLVFHNANQLILPRKYHQTIRQISKHMLELQKDKRALLPDNQLLKESDMDELYLELCRKLKDSIYQVMLGRFLDTYESGYRRYQELSIEKKAEALYQMLKLFQCTPEMPNLTLIGGNAKPGPIRIGMNVTDRSSLAIVHQSVTGIYEQIERII

SEQ ID NO: 957 - protein, 1350 aa, synthetic construct
  REGION 1..1350: note = MG46-61 effector
MSKPGEYYLGLDLGTGSVGWCVTDTEYRIPKVNRRRTIGTVLFSTAETAKERRVIRCARRRLRRQRERLDCLQEMFGEEIAKIDAGFFHRLLESPYIPEDKENLDGSRPELPYALFVDKDFSDVQYHVKYPTIYHLRKELMDDPSPHDLRLVYLAVAHILKHRGHFLSSFDVNENGRSFEEILDDFIKVWNEYTEKNIELSSDSRVILKEILLDSSRLKSQKKTEIIRILGGRNPQFKELAALFVGASTSLEKLFCKEEYKNLEENKIQFDAADYEEKEGYYRESLGDDFEVIERAREIYNWYALSKILKNNPGGRISDAKVEDYRQHKTDLALLKKVLKEHFPKELRYRILNASEKGLANYPAYIGMTKHDGRKKSIAERCTKEDFYKLLEKEVINSLEDCDEKKYIEQQIRLGEFLPRQKGSGNSVIPYQLHLKELQLILKNAEGYLPFLKEKDESGLSVSEKIIQLMTFRIPYYVGPLHTGGKNAYAWVQRLESGKVYPWNFEQKIDVEKTAEEFIQRAVNKCTYLKNEKVLPMCSLLFEKYKVLNELNSVRIFGERLTVADKQKIYQDLFCHHMRVTRKRLIQYLKKEGICVKVEAEDISGIDGDFKSSLKTMLAFKQIHFEKPLSEQIMEDMVRDITLFGADTSLLKKRLLAKYPAYEKQIPMIIKNVKCDGWASLSGKLLEGLAVEIPGLGNVGNIIYLLWNTQQNFMEILYNPEYMFQEMIKKENGATEGKDRKIDYAMVDELYVSPSVKRQIWMALQVIKEVQHFMGGAPKRVFVEMAREKQESKRTSDRKTQIMQLYNAIGSDRVSRELMEELEGCSNDQLRKDKLFFYFTQMGCSAYTGKPISFSDLKDDNLYDIDHIYPRSQTADDSLNNRVLVEAKLNREEKKDNYPLTEKIRADMERLWRFWHEKKLISDEKYHRLTRTTELTNDELLGFVSRQLVETRQSTKALTELLGQIMPDQTEIVYVKAGNVSRFRQQYDLLKVRELNNFHHVQDAYLNIVVGNVYHLKFTKDIRKYFMEKGTYRTYNLTKMFNYTVKYRDETAWEENRTIRTVKEMMKNEKILVSRQTYEEKGELYKVQRLKKGKGQVPVKETGRLSDISKYGGYDKARNTYFMLVKAENKKGRECTCILPVPLYLKQKMEDSEIFMKKYFEQEYQLTHVRLEEKIKIQTLFVYQGFRMRLAGRSGSQIVFHNANELCFPAACQKTIRQIGKHMKELSYDKNARISDNGLLTQDDLDELYRVLCEKLENTVYKIMLHGYIEKYRSGFELYEKLSLEKRAEALWQMLKIFQCTPEMPDLTLIGGSKNQGAIRMGMDISGRESLAIIHQSVTGIYEQIEKIRG

SEQ ID NO: 958 - protein, 1346 aa, synthetic construct
  REGION 1..1346: note = MG46-62 effector
MNKQEYFLGLDLGTGSVGWCVTDTDYQILKKNRKPAIGSVLFSTAETAKGRRTVRCARRRLRRQQERIRCLQELFAEEMGKVDEGFFHRLAESPYVREDKRNADGTMPTLPYALFVDQDYTDKEYHRQYPTIYHLRKELMDHVSAHDIRLVYLAVAHILKHRGHFLSNIDVNGQGESFEELMLQFLNTWNSFFDLEIFLQTDEMENLKAVLLDPGITKTEKKAQIVALMQTKEKQVKELAALLVGASVSLDKLFDQEAYKNLEESKLQFDSASYEEKEGYYQEALGDFFELIARAKAVYNWCALSRILKNNPHGRISDAKVADYEKHKKDLQLLKKVLKEKFPPEVRKKILNESQKGLANYPAYIGMTRHNGRKEVIEGHCSREDFYKLLDKEVLKNLKDCEEKAYIQQQITLGQFLPKQKGSDNSVIPYQIHEKELKQILKNAEEYLPFLKEKDESGFTVSEKILQLLTFRIPFYVGPLNNAHQKEGYAWVVRREKGKVYPWNFEQKVDLEKSAEEFILRATNKCTYLKKEEVLPAGSLLFEKYKVLNELNTVKIQGVRLTVSIKQKVYEDLFCHHQRVTRKRLVQYLKKEGYYEDIGPEDISGIDQDFQSSMRSLLAFKQIHFDTHVSDSVMEDMIRDITLFGADQKLLKKRLLTKYPAYEKQIPAIVKTVKCDRWAPFSRKLLEGLAVETKEGEPIGTILYYLWNEQLNFNEILFQPQYGFQRLIQQENDDLTEKTDGIRYELVENLYVSPSVRRQIWMALKVIDEVQSFMGGAPKRVFVEMAREKQESKRTSDRKSQILQLYAYTKVNKELLEELKGCSNEELRKDKLFFYFMQMGRSAYTGDPIPFSALSDNSLYDIDHIYPRSLTADDSLDNRVLVEAKYNREKKQDKYPIDKKDRDRMAGIWRMWHEKKYISDEKYYRLTRATELTQDELCGFVNRQLVETRQSTKALTELLHQLMPDKTEIVYVKARHVVNFRHRFDLLKVRDLNDFHHGQDAYLNIVVGNIFHLKFTKDMRKYFQEKGTHRTYNLYKMFDYDVEFQGEKAWVSGQTIHTVKTMIASSKVLTARQTYEEKGELYDLQRMKKGKGQVPLKESGRISDIEKYGGYNKATNTYFMLVKAEDKKGKSGTWLLPVPLYLKNRIEDYNEYAKEYFEQEYQLKQVEILRKVKMQTLFIYQGFKMRLAGRSGSQLVFHNANQLILPRKYHQTIRQISKHMLELQKDKRALLPDNQLLKESDMDELYLELCRKLKDSIYQVMLGRFLDTYESGYRRYQELSIEKKAEALYQMLKLFQCTPEMPNLTLIGGNAKPGPIRIGMNVTDRSSLAIVHQSVTGIYEQIERII

SEQ ID NO: 959 - protein, 1350 aa, synthetic construct
  REGION 1..1350: note = MG46-63 effector
MSKPGEYYLGLDLGTGSVGWCVTDTEYRIPKVNRRRTIGTVLFSTAETAKERRVIRCARRRLRRQRERLDCLQEMFGEEIAKIDAGFFHRLLESPYIPEDKENLDGSRPELPYALFVDKDFSDVQYHVKYPTIYHLRKELMDDPSPHDLRLVYLAVAHILKHRGHFLSSFDVNENGRSFEEILDDFIKVWNEYTEKNIELSSDSRVILKEILLDSSRLKSQKKTEIIRILGGRNPQFKELAALFVGASTSLEKLFCKEEYKNLEENKIQFDAADYEEKEGYYRESLGDDFEVIERAREIYNWYALSKILKNNPGGRISDAKVEDYRQHKTDLALLKKVLKEHFPKELRYRILNASEKGLANYPAYIGMTKHDGRKKSIAERCTKEDFYKLLEKEVINSLEDCDEKKYIEQQIRLGEFLPRQKGSGNSVIPYQLHLKELQLILKNAEGYLPFLKEKDESGLSVSEKIIQLMTFRIPYYVGPLHTGGKNAYAWVQRLESGKVYPWNFEQKIDVEKTAEEFIQRAVNKCTYLKNEKVLPMCSLLFEKYKVLNELNSVRIFGERLTVADKQKIYQDLFCHHMRVTRKRLIQYLKKEGICVKVEAEDISGIDGDFKSSLKTMLAFKQIHFEKPLSEQIMEDMVRDITLFGADTSLLKKRLLAKYPAYEKQIPMIIKNVKCDGWASLSGKLLEGLAVEIPGLGNVGNIIYLLWNTQQNFMEILYNPEYMFQEMIKKENGATEGKDRKIDYAMVDELYVSPSVKRQIWMALQVIKEVQHFMGGAPKRVFVEMAREKQESKRTSDRKTQIMQLYNAIGSDRVSRELMEELEGCSNDQLRKDKLFFYFTQMGCSAYTGKPISFSDLKDDNLYDIDHIYPRSQTADDSLNNRVLVEAKLNREEKKDNYPLTEKIRADMERLWRFWHEKKLISDEKYHRLTRTTELTNDELLGFVSRQLVETRQSTKALTELLGQIMPDQTEIVYVKAGNVSRFRQQYDLLKVRELNNFHHAQDAYLNIVVGNVYHLKFTKDIRKYFMEKGTYRTYNLTKMFNYTVKYRDETAWEENRTIRTVKEMMKNEKILVSRQTYEEKGELYKVQRLKKGKGQVPVKETGRLSDISKYGGYDKARNTYFMLVKAENKKGRECTCILPVPLYLKQKMEDSEIFMKKYFEQEYQLTHVRLEEKIKIQTLFVYQGFRMRLAGRSGSQIVFHNANELCFPAACQKTIRQIGKHMKELSYDKNARISDNGLLTQDDLDELYRVLCEKLENTVYKIMLHGYIEKYRSGFELYEKLSLEKRAEALWQMLKIFQCTPEMPDLTLIGGSKNQGAIRMGMDISGRESLAIIHQSVTGIYEQIEKIRG

SEQ ID NO: 960 - protein, 814 aa, synthetic construct
  REGION 1..814: note = MG46-64 effector
MCSLLFEKYKVLNELNSVRIFGERLTVADKQKIYQDLFCHHMRVTRKRLIQYLKKEGICVKVEAEDISGIDGDFKSSLKTMLAFKQIHFEKPLSEQIMEDMVRDITLFGADTSLLKKRLLAKYPAYEKQIPMIIKNVKCDGWASLSGKLLEGLAVEIPGLGNVGNIIYLLWNTQQNFMEILYNPEYMFQEMIKKENGATEGKDRKIDYAMVDELYVSPSVKRQIWMALQVIKEVQHFMGGAPKRVFVEMAREKQESKRTSDRKTQIMQLYNAIGSDRVSRELMEELEGCSNDQLRKDKLFFYFTQMGCSAYTGKPISFSDLKDDNLYDIDHIYPRSQTADDSLNNRVLVEAKLNREEKKDNYPLTEKIRADMERLWRFWHEKKLISDEKYHRLTRTTELTNDELLGFVSRQLVETRQSTKALTELLGQIMPDQTEIVYVKAGNVSRFRQQYDLLKVRELNNFHHAQDAYLNIVVGNVYHLKFTKDIRKYFMEKGTYRTYNLTKMFNYTVKYRDETAWEENRTIRTVKEMMKNEKILVSRQTYEEKGELYKVQRLKKGKGQVPVKETGRLSDISKYGGYDKARNTYFMLVKAENKKGRECTCILPVPLYLKQKMEDSEIFMKKYFEQEYQLTHVRLEEKIKIQTLFVYQGFRMRLAGRSGSQIVFHNANELCFPAACQKTIRQIGKHMKELSYDKNARISDNGLLTQDDLDELYRVLCEKLENTVYKIMLHGYIEKYRSGFELYEKLSLEKRAEALWQMLKIFQCTPEMPDLTLIGGSKNQGAIRMGMDISGRESLAIIHQSVTGIYEQIEKIRG

SEQ ID NO: 961 - protein, 1399 aa, synthetic construct
  REGION 1..1399: note = MG46-65 effector
MNTAVSKDSRGSDYYLGLDIGTASVGWAVANTDYELVKEHRKYLWGVRLFDTADTAAERRLHRAARRRHQRRLQRQRLLKEIFEDKISEVDPHFFERLKESSYHREDRSGNFLSTLFNDESFKDTDYFAKFPTIFHLRSHLIHHPEERPDIRILYLAIHSILKHRGHFLFPGESLESISSFSLLFDELLKNIETSLQCTLHVSCTPETFGTILKKKRRTDKKNDLQEVLTLTRTTEEEIEETPKKLTSELIKALSGTPFLLSMLFENDSYKDSEQDKIEFDKEGFEDLKESIEVLLEPEEYALIEILEGIYNWTLLSDILNGEKFISDAKVASYRNHKDDLKQLKLLVKKYAGSAYYKAFKDPSIQNNYAHYIGTGNKSGKKVQVAHKGKCLQEDVNKYFHNLLKPYQNDEDRDLDNMLEKLEQKSALPKQRVRDNRVIPHQLHLKELQIILENAKAYYPFLTIPDDDGYTPTQKIISMMTFRIPYYVGPLNTSHMEKEGKEGFCWMVRQQGKEDVPIFPWNWTEVVDKNASAEKFITRMTNSCTYLFNEEVLPKFSLLYNRYMVLNELNNLKVNGEPISVELKQKIYNELFLHSGKKTITLKMLQKFLVVNNIVNKGDVTTIEGIDNGFANSLKSHIDFAPYLEANILSVEDVEKIIEWKAYYVDDATILKEKITQELHEKLTSEQIDDITKLVRNYKGWGRLSRAFLEDIYHVDRATGEGYSIIHMMWETNENLMELLSSKYDYLDEIQRINNETLINKKFSYESLVRPLSVSPPVKRQIWQTLLIVHELKKVMGKAPKRVFIEMAREEREKKRTTSRKESLRILYDRCKNDISFNKALLESLDTKTDTELRNDRLYFYYTQMGRCPYCGGKIELDQMNNTQLYDIDHIYPQSLIKDDSLKNRVLAHKACNGEKGNSYPINPQWQNTMIGFWKVLLDRSLISKEKYARLTRTTPLSDEELFAFINRQLVETRQSTKVVASILKNLFQDEGTEIVYVKARNVSSFRTDFEIKKSRLVNDHHHAHDAYLNIVVGNAYHTKFTGDARNFIKELKRGDQYYNASNIFSRSIQRNGRLAWIADERYDANKGRPKSEKQETGTIATIRKMLRNHQVLVTRQAVEVSGALFKLQPLRKKKNLLPLKGSSQTLQDTTKYGGYNAPATAYFALVQHEKKGKEVRQFVPVPILYAELFKQNPGTLLKYCEEELDLINAKIVIPQILLHELVQLKGYTMSLSGITGPQTVANNEIQLVLSDEDYDYVAQIEKYLSLLKKVKDPEVQENAEILAESLHICKQDNLTLYELLLAKERGSIYRYRPANQAKFLEEKRSIFESLDIKGQCEVLVQIINLFTCTPESANLTKLGGGSSSGIVKFQSQITDKEARLIHQSPTGIFTKSRRVYEI

SEQ ID NO: 962 - protein, 1399 aa, synthetic construct
  REGION 1..1399: note = MG46-66 effector
MNTAVSKDSRGSDYYLGLDIGTASVGWAVANTDYELVKEHRKYLWGVRLFDTADTAAERRLHRAARRRHQRRLQRQRLLKEIFEDKISEVDPHFFERLKESSYHREDRSGNFLSTLFNDESFKDTDYFAKFPTIFHLRSHLIHHPEERPDIRILYLAIHSILKHRGHFLFPGESLESISSFSLLFDELLKNIETSLQCTLHVSCTPETFGTILKKKRRTDKKNDLQEVLTLTRTTEEEIEETPKKLTSELIKALSGTPFLLSMLFENDSYKDSEQDKIEFDKEGFEDLKESIEVLLEPEEYALIETLEGIYNWTLLSDILNGEKFISDAKVASYRNHKDDLKQLKLLVKKYAGSAYYKAFKDPSIQNNYAHYIGTGNKSGKKVQVAHKGKCLQEDVNKYFHNLLKPYQNDEDRDLDNMLEKLEQKSALPKQRVRDNRVIPHQLHLKELQIILENAKAYYPFLTIPDDDGYTPTQKIISMMTFRIPYYVGPLNTSHMEKEGKEGFCWMVRQQGKEDVPIFPWNWTEVVDKNASAEKFITRMTNSCTYLFNEEVLPKFSLLYNRYMVLNELNNLKVNGEPISVELKQKIYNELFLHSGKKTITLKMLQKFLVVNNIVNKGDVTTIEGIDNGFANSLKSHIDFAPYLEANILSVEDVEKIIEWKAYYVDDATILKEKITQELHEKLTSEQIDDITKLVRNYKGWGRLSRAFLEDIYHVDRATGEGYSIIHMMWETNENLMELLSSKYDYLDEIQRINNETLINKKFSYESLVRPLSVSPPVKRQIWQTLLIVHELKKVMGKAPKRVFIEMAREEREKKRTTSRKESLRILYDRCKNDISFNKALLESLDTKTDTELRNDRLYFYYTQMGRCPYCGGKIELDQMNNTQLYDIDHIYPQSLIKDDSLKNRVLAHKACNGEKGNSYPINPQWQNTMIGFWKVLLDRSLISKEKYARLTRTTPLSDEELFAFINRQLVETRQSTKVVASILKNLFQDEGTEIVYVKARNVSSFRTDFEIKKSRLVNDHHHAHDAYLNIVVGNAYHTKFTGDARNFIKELKRGDQYYNASNIFSRSIQRNGRLAWIADERYDANKGRPKSEKQETGTIATIRKMLRNHQVLVTRQAVEVSGALFKLQPLRKKKNLLPLKGSSQTLQDTTKYGGYNAPATAYFALVQHEKKGKEVRQFVPVPILYAELFKQNPGTLLKYCEEELDLINAKIVIPQILLHELVQLKGYTMSLSGITGPQTVANNEIQLVLSDEDYDYVAQIEKYLSLLKKVKDPEVQENAEILAESLHICKQDNLTLYELLLAKERGSIYRYRPANQAKFLEEKRSIFESLDIKGQCEVLVQIINLFTCTPESANLTKLGGGSSSGIVKFQSQITDKEARLIHQSPTGIFTKSRRVYEI

SEQ ID NO: 963 - protein, 830 aa, synthetic construct
  REGION 1..830: note = MG46-67 effector
MLKEYDANIYKEFFNSGEKIKNNYSAYIGFYKKNGRKITVKKCTREDFIKAVKKILETIQTSEEVLYIKQEIESDTFLPLQVSKDNGVIPYQIHQMELKKILEGAKTHYDFLNHVEEDGICIADKILQLFAFKIPYYVGPLNTAAGNNSWMVRKKLADGTEKTGSIRPWNFEEMVDCDASAERFIRRMTNKCTYLLGKDVIPKNSLLYCEFMVWNELNNVKIKGEKLPATLKQLVFESLFKQKKRVSPKMFLSYLKSEGLDIDREELSGIDQTFCSSLTSYIDFKNIFGEEIEKHSIQQMVENIILWITLYGDEKKMLKRVIRKNYSKQQISEEQLKKICRLPYQGWGRLSKEFLAETEAVNQETGELFTIIQALRQTEDNLSQLLSAKYTFTEAIAKENAKILKPVSSVSYKELFEELVVSPAIKRSSWQVILIAEEIRKIMGKRPKKIFIEMARGAEEKKERKASRKDRLIELYQSCKDEERDWKGELENRTESDFRSIKLYLYYTQMGRCMYSNEPIELSQLSDATVYDRDHIYPQAKTKDDSLDNLVLVKRTINAEKRADILSPDIQKKMSGFWKMLKGRGFISEEKYNRLMRKTPLTDEELAGFINRQLVETRQSAKIVTNLLKQVYPHSAVVYVKAKAVSDFRNETLELVKVREMNDFHHAKDAYLNIVVGNVYHEKFTDNPLKWLQNTKNRTYSLKCIFTYDVIKKEKLIWKSGANGSLAVVKKYMNSNDIRYTRYALCNKGGFFDQQPVAKDANAGVPLKKGMDVKKYGGYKTITPACFALVESEDKKGKKQRSIEAVPLYLEKAFKRTLSFLLHIVKKIMV

SEQ ID NO: 964 - protein, 614 aa, synthetic construct
  REGION 1..614: note = MG46-68 effector
RRRLDRRQQRVKLVQEIFASEIAKVDENFYRRIKESALWREDSSEPYVLFNDNGFTDREYHKKYPTVHHLICALMNEEKPFDVRLVYIACAWLAAHRGHFLNEVSKENISEILDFSKVYNEFAECFESGLPWTCSSTDFSEVLKKDLGVTAKYKELCLKLFNSPKPPKQLESEYGIDAMLKLMCGGKASAKDLFKNEEYAEIESFSLDKSDDELAPILSALGDDAETVLRIKALYDWALLYKVLSGCEYISEAKIKVYEQHKEDLKKLKYIVRKYAKEKYYKVFRSTATAHNYASYIGKGEKGCTKEDFCKFLKPILADIKADDADSGVYDELLSKLSANSLCPKQVNGDNRIIPHQVYWVELKKILDNAQEYLPFLTVPDADGYTPKEKLLSVFEFKIPYFVGPLNRSSKEFSWFVRKAEGKIYPWNFEKLIDFEKSEQAFIDRMTNTCTYIKSADVLPKCSLLQEKFQVLNEINTITVNGERIPSDVKRRLYYELFMTKKRVTKKAVKTFLLINNLYSKSDLETLAGIDDNIKSSLSSHIAFKNLLANGSITENEAEQIILRATYTENKYRFKKWVDASFASLSEADRRYISNLKFKDFARLSKELLCETFE

SEQ ID NO: 965 - protein, 1360 aa, synthetic construct
  REGION 1..1360: note = MG46-69 effector
MKEINEYYLGLDMGEGSLGWAVTTPDYHVVKKAGKALWGVRLFESAKTAKERRVFRTGRRRIERRNQRIDFLQELFSEAVCEKDPGFYQRLNDSRLWEEDKTERQINSLFNDVDFTDKSYHKKFPTIYHLRQKLMEDSCEFDVRLVYLAIHHILKHRGHFLLENFEIKEDGAAGFEEAMADLGNVLGQFLDISLPVENNDACKEILKNRKLNKLEKLEQLGKLYDAGRDKSIKEIFRLIVGGTAHLAVIFRDETLKNMERGKISFDDAQYEEYKNDVQTILDDCFDVVAACETLHNWAVLAELMGNHKYISDAKVAIFNEHRKDLTVLKRLLKWDSNVYSRIFRMAGKNSYSAYVGLCKIHGKKVPIEKACTQEDFAGEIKKIIKNFPDSEDKKYILDKIERNEFLTKAVSKQNGVIPYQLHLVELNKILSNAERYLPFLKKEDEYGTVSDKIRKLFIFRIPYYVGPLNGHSPFAWAVRKDENGHIYPWNFERKIDIEASAEEFIRRMTNKCTYLLKKDVLPKNSLLYTEFMVLNELNNVRIGSAQEKLPPGMKARVWERLFLKDKKITAKKMCSYLIREEHISKEEAAQISGIERDFKASLAPWIDMRKILGDNFTVSDSEKIIKDITLFGADKKMLRRRLKARFGYLEDCQVKELVRLPYQGWGRFSKEFLTQILPKAERDSTVLVDQETGEVMNIITALKKTDHNLMELLSGKFGYSAALSEVNTTSVSVCDKAISYKNIQDMRISPAVKRPLWQTLRVIKEIIHIMGKAPSRIFIEMARAEDEKKRKTVSRKDRLLDLYKKCNDEIRHWSADIKKLGEEIKELSDGQLRSDKLYLYYTQMGRSMYTGKPICLGSLMAGADYDIDHIYPRSATGDDSLDNRVLVEKTENAKKGDHYPLSVEIQRERADFWKILLDKGLISKEKYHRLTRKTLLTDDEKAGFIGRQLVETRQSTKAVAEILKKAFPETKIIYTKARNVSRFRQYAGFVKVRDMNDYHHAKDAYLNIVVGNAFYTKFTSNPVHFLSEKNAVYSLNEKSFYQFPIQRGSTMAWEPGDNGTMAVVRKWMDKNNILYTRMPFEEKGGLFDQNIRKKGKGQVSLKAQGALSDIQKYGGYNKATASYFMLVKAEKNGKRIYLLETVPLHLSERLESIDDKTDFCRELWHKEGKGYKNPVICIPKIYKQSLFEVDGFREHISAKTGDRFVMRNAEQLCLNAESAQIIKNVLKFNQRKQVQKELKVTVHDKITEENLINIFEAFISKIQTSIYRNKFKKFVSLMIKEKGTFIELSMEDKCKCIGEILHLFQCNPVLSNLQLIGGEKASGKISMGKKFDGNEKVFLILQSVTGFFEKKILLAPYEKK

SEQ ID NO: 966 - protein, 1378 aa, synthetic construct
  REGION 1..1378: note = MG46-70 effector
MMKELKNYFIGLDMGTTSVGWAVTDENYEIIKKNGKALWGIRLFEEAQTAAERRMHRISRRRIERRSRRIDLLQELFAQEICKKDPGFYERLNESGLYEEDKKVHQKNSLFNDVDFDDKAYYKEYPTIYHLRYDLMTKDRPFDVRLVYLAVHHILKHRGHFLFDSFQIDENGASGFDESFAAFGNALYRIRGISLDVRGTDTVKDIFRNKKLGVKEKAKALLQALGKEKEKDFKAMMTLAAGGTALLSDILGEEGLKDFEKNKVSFSGAQFEENEPDIMAELGDRYDLIAALHGLYNWSLLAELMGNYRYISEAKKAIYNKHKEDLKVLKRVLKQNPAVYAKIFKEPGSKSNKNYSAYVGVCKVKGKKAAIDKCSYEDFAKTLKSCLKDLPDSKDTEYISRELEQGTFLPKSVTKENGVIPYQLHLQELKKILANAKKYLPFLKIKDAYGTVSDKIISLFTFRIPYYVGPVNEHANSCWAVKKDKKGKVYPWNFSEKIDVEKSAEGFIRNLTNKCTYLIGEDVLPKNSLLYSEFTVLNELNNVRIGENAQKLSPELKEKVLENLFKKHKHVSRRKFINYFATEGIDKKEAESISGLDGDFKSSLSSLIDLTNILGNDFSREDGEQMIKDITIFGGDRKMLKSRLHREFPYLTPEQLTRLIHLSYQGWGRLSKELLVNLLPAEKSAGEVLVDKGSGEVLNIISAMEQTSYNLMELLSSRFGYAKAIEERNREKEGNGTISYQDVEDMYISPAVKRPLWQALKIVREIVKILGKEPSKIFIEMARENGEKGKRTISRKARLQELYKKCRDDSRDWAKELAEKPEEDFRSDRLYLYYTQMGRSMYTGKPIDINQLFDRNVYDIDHIYPQSLTGDDSLDNRVLVEKTVNAKKGDTYPLGSALDGCHIGGQIHIQDIQKEMRPFWRMLLEKGLISKEKYNRLSRTTPLTDTEKAAFIGRQLVETRQSTKACAELLSKACSEARIVYTKAGNASRFRQYGGFIKVRDMNDYHHAKDAYLNIVVGNVFDTRFTSNPIRFLKGNHPVYSLNVEALYGHRVSRGGVDAWIPAEKDDEGHIMAGHEGTMGTVRKWMRKNNILFTRMPLEGKGGLFDQTIMKKGKGQVPLKGDSPVSDIEKYGGYNKASVAYMMLVKAEEKGEPVYILESVPNYVKNQLKTDKERRAYCAGIWAAQGSRYTNPEICIPEIRIQSLFEMNGFKAHISGKTGNLYVMRNAQELCMDDLLAKILKNVLKFNNRKAVQKDAVVTAYDGITDENTLELYDFFADKLSHSIYRKKLSAQADFLDQSKDKFAGLPLEERCEVLGAILHLFQCNAVLSDFHLLGGSRQAGRIYLNKKIKAQDHVCLIVQSVTGFFEKRILLAPYGEK

SEQ ID NO: 967 - protein, 1360 aa, synthetic construct
  REGION 1..1360: note = MG46-71 effector
MKEINEYYLGLDMGEGSLGWAVTTPDYHVVKKAGKALWGVRLFELAKTAKERRVFRTGRRRIERRNQRIDFLQELFSEAVCEKDPGFYQRLNDSRLWEEDKTERQINSLFNDVDFTDKSYHKKFPTIYHLRQKLMDDSCEFDVRLVYLAIHHILKHRGHFLLENFEIREDGAVGFEEAMADLGNVLGQFLDRSLPVENNDACKEILKNRKLNKLEKLEQLGKLYDAGGDKSIKEIFRLIVGGTAHLAVIFCDETLKNTERGKISFEDAQYEEYKNDVQTILDDRFDVVAACETLHNWAILAELMGNYKYISDAKVAIFNEHRKDLTVLKRLLKRDSNVYTKMFRMAGKNSYSAYVGLCKIHGKKVPIEKACTQGDFAGEIKKIIKNFLDSEDKKYILDKIERNELLPKAVSKQNGVIPYQLHLVELNKILSNAERYLPFLKKEDEYGTVSDKIRKLFTFRIPYYVGPLNGHSPFAWAVRKDGNGHIYPWNFERKIDIEASAEEFIRRMTNKCTYFVKKDVLPKNSLLYTEFMVLNELNNVRIGSAQEKLPPGMKARVWERLFLKDKKITAKKMCSYLIREEHISKEEAAQISGIERDFKASLAPWIDMRKILGDNFTVSDSEKIIKDITLFGADKKMLRRRLKARFGYLEDCQVKELVRLPYQGWGRLSKEFLTQILPKAERDSTVLVDQETGEVMNIITALKKTDHNLMELLSGKFGYSAALSEVNTTSVSVCDKAISYKNIQDMRISPAVKRPLWQTLRVIKEIIHIMGKAPSRIFIEMARAEDEKKWKTVSRKDRLLDLYKKCKDEIRNWSADIKKLGEEIKELSDGQLRSDKLYLYYTQMGRSMYTGKPICLGSLMAGADYDIDHIYPRSATGDDSLDNRVLVERTENAKKGDHYPLSIEIQGGRAVFWKVLLDKGFISKEKYRRLTRKTLLTDDEKAGFIGRQLVETRQSTKAIAEILKKAFPETKIIYTKARNVSRFCQYAEFVKVRDMNDYHHAKDAYLNIVVGNAFYTKFTSNPIHFLSEKNAVYSLNERTFYQFPIQRGSTMAWEPGDSGTMAVVRKWMDKNNILYTRMPFEEKGGLFDQNILKKGKGQVSLRARGALSDIQKYGGYNNATASYFMLVKAEKNGKTIYLLETVPLHLSGRLESIEDKINFCRELWHRDRKDYKNPVICIPKIYKQSLFEVDGFREHISAKTGNQFVMRNAEQLCLNAESAQIIKNVLKFNQRKQVQKELKITVHDKITEENLINIFETFISKIQTSIYRNKFEASVGLMIKGKGTFIELSMEDKCKCIGEILHLFQCNPVLSDLQLIGGKKASGRIYMGKRFDGNKKVFLVLQSVTGFFEKKILLAPYEKK

SEQ ID NO: 968 - protein, 1330 aa, synthetic construct
  REGION 1..1330: note = MG46-72 effector
MERCGKNAAYLGLDIGSTSVGWAVSDETYRLCRVKGKDMWGVRLFEEAQTAAARRVARVQRRRYDRRNQRLALLQELFQAQIARVDPAFFQRMDAARLWSQDKPWKYTLFEQKGWTDREYHAQYPTVYHLRRALMTQDGPFDVRLVYLALHHILKKRGHFLYADLGDGQLPELEEIIRELELRFEDELGMELRCHDIDTLRPLLMDSTLSISARQKQLNAVFAAETKQQKTWVKALTGAKVKLSELYEDPTLEEAEQKEAEFRKAGYEDGLPVLEAVLGDRFALLEAWRSLYNWGVLQRLLGGASSISEAKVRQYEQNKKDLAELKAVLRADRTLYNRVFRATDVPGNYASIVGHAWVEGKKQTVKVCGHEDFCKFIEKVLDTLEQDERVQALRTRAKEGILLPKLISGDNSVIPYQLHRAEMEQILDRAAVYLPFLKEKDAEGLTPADKIRALLVFRIPYYVGPLNPHSPNSWFVRKTEGPIYPWNFEDRVDRVRSAQAFIDRMTSFCTYLRGCDVLPACSPIYERFTVLNELNPMTVKGEPLSIELKQAIFEQVFLKIRKPGIRNIVGFLRAQGYDVSREDLGGIDVQGGVKSSLRTTLALQEILGEKYDDAKAEEIVLAATYFGDDRRLLREKLRSLGLTDDVIGRLLRLHCAGWGRLSREMLCEVTSFVPGQPDGASILDTLWKTNETLMGLLSDRYTFAEAIEARNREVGEESLYDFIDELYVSPSVKRQIRQTVLVARELRKVIGHDPKKIFIEMARGKEKKPERKPKRKQTLLACYETFQNEAGALYETLMQTDNQRLRQDKIYLYYTQMGRCMYSGERIDLEELLRSESLYDIDHIYPRSRVKDDSIDNRVLVKRTLNEKKGNDYPLSHEIVEGQRAFWSMLLYRKLISREKYERLTRRTGFTDEELTSFAARQLVETRQGTKAVAQLLGRMMPDSEIVYVKAGLVSDFRHARSLPKVRELNDLHHAKDAYLNIVVGNIYNTQFTHSPMRYICEHRDNYTVNLDSLLKMEIHRGGVLAWDPADGGSIATVRRTMARNSPLVTMMPVIYSGILFDLQPKPQGQGQMPLKKGLPIEKYGGYNKVTGACFMLVEHTLRRRRVRSLIDVPLHLYPDAVSHPELALRHCIEMRDLKEPRIILPIIRMRALLSLDGYKMYITGRTNGNLCIQNANQLMVSEEWEQYIKKIVKAARESMEYERLRGGDGYRPNPRDGLCPEKNLALYDLFVQKMERMPYCQRMSGQRDKLLQARAAFEALDVAQQCCILCQLLNLFSRVGGEADLTGIGLVKNFGILHPSGMISGCAQALLIHQSPTGLYERVVDLNRL

SEQ ID NO: 969 - protein, 788 aa, synthetic construct
  REGION 1..788: note = MG46-73 effector
MCSYLIREEHISKEEAAQISGIERDFKASLAPWIDMRKILGDNFTVSDSEKIIKDITLFGADKKMLRRRLKARFGYLEDCQVKELVRLPYQGWGRLSKEFLTQILPKAERDSTVLVDQETGEVMNIITALKKTDHNLMELLSGKFGYSAALSEVNTTSVSVCDKAISYKNIQDMHISPAVKRPLWQTLRVIKEIIHIMGKAPSRIFIEMARAEDEKKWKTVSRKDRLLDLYKKCKDEIRNWSADIKKLGEEIEELSDGQLRSDKLYLYYTQMGRSMYTGKPICLGSLMAGADYDIDHIYPRSATGDDSLDNRVLVERTENAKKGDHYPLSIEIQGGRAVFWKVLLDKGFISKEKYRRLTRKTLLTDDEKAGFIGRQLVETRQSTKAIAEILKKAFPETKIIYTKARNVSRFRQYAEFVKVRDMNDYHHAKDAYLNIVVGNAFYTKFTSNPIHFLSERNAVYSLNERTFYQFPIQRGSTMAWEPGDSGTMAVVRKWMDKNNILYTRMPFEEKGGLFDQNILKKGKGQVSLRACGALSDIQKYGGYNNATASYFMLVKAEKNGKTIYLLETVPLHLSGRLESIEDKINFCRELWHRDRKDYKNPVICIPKIYKQSLFEVDGFREHISAKTGNQFVMRNAEQLCLNAESAQIIKNVLKFNQRKQVQKELKITVHDKITEENLINIFETFISKIQTSIYRNKFEASVGLMIKGKGTFIELSMEDKCKCIGEILHLFQCNPVLSDLQLIGGKKASGRIYMGKRFDGNKKVFLVLQSVTGFFEKKILLAPYEKK

SEQ ID NO: 970 - protein, 576 aa, synthetic construct
  REGION 1..576: note = MG46-74 effector
MKEINEYYLGLDMGEGSLGWAVTTPDYHVVKKAGKALWGVRLFESAKTAKERRVFRTGRRRIERRNRRIDFLQELFSEAVCEKDPGFYQRLNDSRLWEEDKTERQINSLFNDVDFTDKSYHKKFPTIYHLRQKLMEDSCEFDVRLVYLAIHHILKHRGHFLLENFEIREDGAVGFEEAMADLGNVLGQFLDRSLPEENNDACKEILKNRKLNKLEKLEQLGKLYDAGGDKSIKEIFRLIVGGTAHLAVIFCDETLKNTERGKISFEDAQYEEYKNDVQTILDDRFDVVAACETLHNWAILAELMGNYKYISDAKVAIFNEHRKDLTVLKRLLKRDSNVYTKMFRMAGKNSYSAYVGLCKIHGKKVPIEKACTQGDFAGEIKKIIKNFPDSEDKKYILDKIERNELLPKAVSKQNGVIPYQLHLVELNKILSNAERYLPFLKKEDEYGTVSDKIRKLFTFRIPYYVGPLNGHSSFAWAVRKDENGHIYPWNFERKIDIEASAEEFIRRMTNKCTYLVKKDVLPKNSLLYTEFMVLNELNNVRIGSAQEKLPPGMKVRVWERLFLKDKKITAKKCVLI

SEQ ID NO: 971 - protein, 1278 aa, synthetic construct
  REGION 1..1278: note = MG46-75 effector
MKNEKKSFGEYYLGIDAGTDSVGWAVTDENYNVLKFHGKAMWGVRLFEEAQTAADRRAFRTARRRQGRKVQRTKLLQELFAEEICKKDSAFFIRMADSKYYAEDKTEPQQNALFDDVDYTDKDYHKEYPTVYHLRRAFIEGKDIRDPRLLYLAVHHIINNRGHFLFEGMDLSKVVDFETPFSILKEYLREEDFGFDFSNIDADALKESLKNKQGITQKKKDLYKLLGKEKGTLKSVCDLLAGGSGIKLTDLFNDESLAGETPDKISLSDSSIEDDRTALENILQDRIQLLDCLKAVYDWAILDEILSGSPYISFAKTQSYEKHKKDLALLKKTIKRLCPEKYKEVFKSPNTANNYCAYSGMCVINGKKTAIEKRTTASDFGKYIAKLLSSFDDPDAKDILRQIDAQTFMPKQRTGENSVLPYQVHKVELEKILGNAEMNFPFLLKKDDSNLTVKDKIIKLLTFRIPYYVGPLNDKHRNSGFCWIVRKNTEDTSRILPWEFEQKVDLYASAEQFINRMTNKCSYLVGEDVLPKDSLLYSEYSVLNELNNLKLSGESLAQSDKAEIIDELYKKNNKVKIKDIANYYKRKGFEVKPDDFTGFHEELKSSLRSYNMFFNILRDRFDESAVEAAIKAIVLFGNDKKMLLQKLRSIKNGYFTEEEIKRMAGFKFSDWGRLSEKMLTGIYSVNKETGEAFNIIEALRTTDKNLMQLLSAELDFKKQIDAENEKINGGIPEFSYDALVKDCYASPAVKRSIWQVLTIAKEIEKITGHAPKKIFMETTREDREKKATKSRKKQLVELYKKCREETSELLKTLEKREDSELRNNALYLYYTQMGKCMYSGETIELEHLFDKNVYDIDHIYPQSKTKDDSLNNKVLVKKELNGQKSDRYPVPRDILSPGIENHWKCLRAAGLISEEKYKRLTRRTNFSDTELSGFIARQLVETNQATKAAAEILKRVYPETRLVYSRASNVDVFKKRYDILKVREVNDYHHARDAYLNIVVGNVFDVKFTMNPLNFIKGGGTYSLNENMYDSDIRRGSNVAWVAGNNGTIATVKKTCSKENILFTRYAFEQKGGLFDQQIMKKGKGQLPTKPSDPHMQGQTEQEWIDKYGGYNKLSGAYFCLVEYKDKGKIVRSIESVPLLVSAKIKNDPSDLEKYLKQALGTEELSVRIREIKFNTLFNHNGFLMHITGRQGNQLIFKPALQLKVNASDYAYIKKIVRFCEREKESKKAFTVSGFDGIEKDRNIELFDFFYQKTFKRYFYGPSCGNIEISVGEQEHIC

SEQ ID NO: 972 - protein, 2661 aa, synthetic construct
  REGION 1..2661: note = MG46-76 effector
MKNKNDYYIGLDISTHSNGWAVTDENYNIIKRNGKSLWGTRLFDEAKTAKERKTLRAARRRLERRSWRIKLLQELFAQEICKKDPGFYVRMKESGFHKEDKTIHQPNSLFNDINFNDKAYHSSYPTIYHLRYALMTEDKAFDVRLVYLAIHHIMKHRGHFLFANLKTDEKGIALFEDSFNAYCNVVERILGDSLKTDKVENIKDLFKNKDLSKAKKEKALLECLDKVGDKRYKAMVTLAVGGTAQLSTVFNDENLKEKESSTTSVCFAKEDYESKEPEIMDKLGERFDLIAVLHDLYNWSLMAQIMKGHKFISEAKIENYDNHKSDLAVLKRVFKQNPEAYAHMFKEPGGKKEKANYSAYVGLCKVKRSKTPITKCSYEEFITELKKRLQQFPSNEDKEYIKQRIKNGEFLRKAVNKENSIIPYQLHLQELKNILAKAERYLPFLKEKDEYGTISDKIISLFTYRIPYYVGPMNEHANHCWIVKKDKNGRVLPWNFNEKIDTENTAEKFIRSLTNKCTYLVGEDVLPKNSLLYTKFTVLNELNSVKIGRNLQRLDEELKAKVLKNLFMVYKHVTKREFVTYLLTEGYNRDEIEPVNGIENGFNSNLGPWIDLKKIMGESFNYKDGEQIIRDITIFGNDKNMLKSRIRRMYPSLSSKQVENLSSLSYQGWGKLSKELLLNVIAEPGEKHEMLVDKATGKALNIISAMEKYPLNFMELLSDRYGYTKAIEEKNKGRWGEGEITYEDVEALHISPAVRRPLWQAMKIIREIVKIMGREPTRIFIKMARGDGVNGKATVSRKDKLFELYKKCKDDTRDWVKELGTQGNEDFRSDKLYLYYTQMGRSMYTGKPIDINELFNKNMYDIDHIYPQSFTGDDSLDNRVLVEKAVNSKKDAVYPLGDALNGCHIPWQNIHIEDVQKEMKPFWEMLCDKGFISKEKYKRLIRTTPLTNEEKAAFIGRQLVETSQSTKTCAELLSRAYPNTKIVYSKASNVSRFRQYGDFIKVSTMNDFHYAKEAYLNIVVGNVFYTKFTSSPLNFLKEKNSVYTLNTRSLYSRKISRGGVDAWIPPQKDKEGNIIPGHEGTMSTVRKWMSKNNILITRMTFEGKGGLFNQTIMKKGEGKLPLKGKLPLSDMSKYGGYTGVSLAHISLVRAKKGKKTVYMFESVPVYCAKTLKTKEDYVAYFKKVWKEENKDYEDPEILIPIIPLQSLIEVNGFKMHISGKNGNGYSVKNAQELCADDSFAAVLKKALKYNLSEQGEISDEEVSYLYDFFIDKLQNTIYSKKFDGIAKKLSMKNKNDYYIGLDISTHSNGWAVTDENYNIIKRNGKSLWGTRLFDEAKTAKERKTLRAARRRLERRSWRIKLLQELFAQEICKKDPGFYVRMKESGFHKEDKTIHQPNSLFNDINFNDKAYHSSYPTIYHLRYALMTEDKAFDVRLVYLAIHHIMKHRGHFLFANLKTDEKGIALFEDSFNAYCNVVERILGDSLKTDKVENIKDLFKNKDLSKAKKEKALLECLDKVGDKRYKAMVTLAVGGTAQLSTVFNDENLKEKESSTTSVCFAKEDYESKEPEIMDKLGERFDLIAVLHDLYNWSLMAQIMKGHKFISEAKIENYDNHKSDLAVLKRVFKQNPEAYAHMFKEPGGKKEKANYSAYVGLCKVKRSKTPITKCSYEEFITELKKRLQQFPSNEDKEYIKQRIKNGEFLRKAVNKENSIIPYQLHLQELKNILAKAERYLPFLKEKDEYGTISDKIISLFTYRIPYYVGPMNEHANHCWIVKKDKNGRVLPWNFNEKIDTENTAEKFIRSLTNKCTYLVGEDVLPKNSLLYTKFTVLNELNSVKIGRNLQRLDEELKAKVLKNLFMVYKHVTKREFVTYLLTEGYNRDEIEPVNGIENGFNSNLGPWIDLKKIMGESFNYKDGEQIIRDITIFGNDKNMLKSRIRRMYPSLSSKQVENLSSLSYQGWGKLSKELLLNVIAEPGEKHEMLVDKATGKALNIISAMEKYPLNFMELLSDRYGYTKAIEEKNKGRWGEGEITYEDVEALHISPAVRRPLWQAMKIIREIVKIMGREPTRIFIKMARGDGVNGKATVSRKDKLFELYKKCKDDTRDWVKELGTQGNEDFRSDKLYLYYTQMGRSMYTGKPIDINELFNKNMYDIDHIYPQSFTGDDSLDNRVLVEKAVNSKKDAVYPLGDALNGCHIPWQNIHIEDVQKEMKPFWEMLCDKGFISKEKYKRLIRTTPLTNEEKAAFIGRQLVETSQSTKTCAELLSRAYPNTKIVYSKASNVSRFRQYGDFIKVSTMNDFHYAKEAYLNIVVGNVFYTKFTSSPLNFLKEKNSVYTLNTRSLYSRKISRGGVDAWIPPQKDKEGNIIPGHEGTMSTVRKWMSKNNILITRMTFEGKGGLFNQTIMKKGEGKLPLKGKLPLSDMSKYGGYTGVSLAHISLVRAKKGKKTVYMFESVPVYCAKTLKTKEDYVAYFKKVWKEENKDYEDPEILIPIIPLQSLIEVNGFKMHISGKNGNGYSVKNAQELCADDSFAAVLKKALKYNLSEQGEISDEEVSYLYDFFIDKLQNTIYSKKFDGIAKKLSSKRSKFSNLKLKDKCKVLKEVLQLFQCNSSPANLTVLGCADRTGLLTIGKNISEKDHVYLIEQSITGFYEKRILLNPYEGK

SEQ ID NO: 973 - protein, 1349 aa, synthetic construct
  REGION 1..1349: note = MG46-77 effector
MKNEKKSFGEYYLGIDAGTDSVGWAVTDENYNVLKFHGKAMWGVRLFEEAQTAADRRAFRTARRRQGRKVQRTKLLQELFAEEICKKDSAFFIRMADSKYYAEDKTEPQQNALFNDVDYTDKDYHKEYPTVYHLRRDFIEGKDIRDPRLLYLAVHHIINNRGHFLFEGMDLSKVVDFETPFSILKEYLREEDFGFDFSNIDADALKESLKTKQGITQKKKDLYKLLGKEKGTLKSVCDLLAGGSGIKLTDLFNDESLAGETPEKISLSDSSIEDDRTALENILQDRIQLLDCLKAVYDWAILDEILSGSPYISFAKTQSYEKHKKDLALLKKTIKRLRPEKYKEVFKSPNTANNYCAYSGMCVINGKKTAIEKRTTASDFGKYIAKLLSSFDDPDAKDILRQIDAQTFMPKQRTGENSVLPYQVHKVELEKILGNAEMNFPFLLKKDDSNLTVKDKIIKLLTFRIPYYVGPLNDKHRNSGFCWIVRKNTEDTSRILPWEFEQKVDLYASAEQFINRMTNKCTYLVGEDVLPKDSLLYSEYSVLNELNNLKLSGESLAQSDKAEIIDELYKKNNKVKIKDIANYYKRKGFEVKPDDFTGFHEELKSSLRSYNMFFNILRDRFDESAVEAAIKAIVLFGNDKKMLLQKLRSIKNGYFTEEEIKRMAGFKFSDWGRLSEKMLTGIYSVNKETGEAFNIIEALRTTDKNLMQLLSAEFDFKKQIDAENEKINGGIPEFSYDALVKDCYASPAVKRSIWQVLTIAKEIEKITGHAPKKIFMETTREDREKKATKSRKKQLVELYKKCREETSELLKTLEKREDSELRNNALYLYYTQMGKCMYSGETIELEHLFDKNVYDIDHIYPQSKTKDDSLNNKVLVKKELNGQKSDRYPVPRDVLSPGIENHWKCLRAAGLISEEKYKRLTRRTNFSDTELSGFIARQLVETNQATKAAAEILKRVYPETRLVYSRASNVDVFKKRYDILKVREVNDYHHARDAYLNIVVGNVFDVKFTMNPLNFIKGGGTYSLNENMYDSDIRRGSNVAWVAGNNGTIATVKKTCSKENILFTRYAFEQTGGLFDQQIMKKGKGQLPTKPSDPHMQGQTEQEWIDKYGGYNKLSGAYFCLVEYKDKGKIVRSIESVPLLVSAKIKNDPSDLEKYLKQALGAEELSVRIREIKFNTLFNHNGFLMHITGRQGNQLIFKPALQLKVNASDYAYIKKIVRFCEREKESKKAFTVSGFDGIEKDRNIELFDFFTKKLSSDIFMVHHAATLKSLLANRSIFVDMSVEMQARTIYQILHIFRCNRMLADLTALQGAKSAGTVLMSKKISLNDKIMIINQSPTGLFENSVDLLTV

SEQ ID NO: 974 - protein, 1383 aa, synthetic construct
  REGION 1..1383: note = MG46-78 effector
MKEIKKIFIGLDMGTNSVGWAATDENYEVIKKNGKALWGIRLFDEAQTAEDRRMHRIARRRIERRSRRIDLLQELFAQEICKKDPGFYERLNESGLYEEDKTVHQTNSLFNDVDFNDKAYYKKYPTIYHLRHALMTENHPFDVRLVYLAIHHILKHRGHFLFENFQTDEKGTSGFDESFAAFGSALDRIKGSSPDVRKADSMKDILKDKKLGVKEKAASLLQCLGQGKEKDFNAMMTLAAGGTASLSDIFNDEKLKDFEKNKVNFSGAQFEENEQDIMAELGDRYDLIAALHGLYNWSLLAELMGEHRYISEAKIAVYDKHKADLKVLKRVLKQSPDIYAKIFREPGSNANKNYSAYVGVCKVKGKKAAIEKCSYEDFAKTLKSCLKEMPDNNDKDYISRELDMGTFLPKSVSKENGVIPYQLHLQELKIILSKAEAYLPFLKVRDQYGTVSDKIISLFTFRIPYYVGPINEHANSCWVVKKDKQGKVYPWNFTEKIDIEKSAEGFIRNLTNKCTYLIGEDVLPKNSLLYSEFTVLNELNNVRIGETMQKLPLSLKEKVMDNLFSCYKHVSRTKFIKYLVSEGIDKKEAESISGLDGDFKSSLSSLIDMKHILGNDFSREDAEKMIKDITIFGGDKKMLKNRLHREFSYLTPEQLTSLTQLSYDGWGRLSKEFLVNLLPAEGNSCEVLVDHTSGEVLNIISAMRQTSYNLMELLGSRFGYGQAIEERNRKEEGQGRITYKDVEDLYISPAVRRPLWQALKIVREIVKITGKEPSKIFIEMARENGEKGKRTISRKARLQALYKKCKDDTRDWTKELKGKPEEDFRSDRLYLYYTQMGRSMYTGKPIDINRLFDRNVYDIDHIYPQSLTGDDSLDNRVLVEKTVNAKKGDTYPLSSALDGCYISGQQIRIQDIQKEMRPFWHMLLEKELISKEKYNRLSRTIPLSDAEKAAFIGRQLVETRQSTKACAELLSKAYPQTRIVYTKAGNASRFRQYGGFIKVRDMNDYHHAKDAYLNIVVGNVFDTRFTANPLHFLKGNHPAYSLNTEALYGHKVSRNGVDAWIPAEKDERGQVIEGHEGTMKTVQKWMKKNNILFTRMPYEGKGGLFDQNIVKKKKGQKKKGLVPIKGKPPISDIEKYGGYNKASIAYIMLVQAEEKGKPVYLLESIPNYVKNKLTSDKERQAYCVKTWTVQENKCRNPQILIPKIRIQSLFEIDGFKAHISRKTNDQFAMRNAQELCMDNALAGVLKKVLKFIQRETVQKNAAITEYDGISNDNTSELYDFFVDKLSNSIYGKKFAAQADFLRQSKDKFMNLLLEERCEVLGSILHLFQCNPVLSDLRLLGGKKSTGTILLNKKIKPEDHVYLIEQSVTGFFEKRILLAPFGEK

SEQ ID NO: 975 - protein, 990 aa, synthetic construct
  REGION 1..990: note = MG46-79 effector
MYTRGFCRGNKKIIKNFPDSEDKKYILDKIERNELLPKAVSKQNGVIPYQLHLVELNKILSNAERYLPFLKKEDEYGTVSDKIRKLFTFRIPYYVGPLNGHSPFAWAVRKDGNGHIYPWNFERKIDIEASAEEFIRRMTNKCTYFVKKDVLPKNSLLYTEFMVLNELNNVRIGSAQEKLPPGMKARVWERLFLKDKKITAKKMCSYLIREEHISKEEAAQISGIERDFKASLAPWIDMRKILGDNFTVSDSEIIIKDITLFGADKKMLRRRLKARFGYLEDCQVKELVRLPYQGWGRLSKEFLTQILPKAERDSTVLVDQETGEVMNIITALKKTDHNLMELLSGKFGYSAALSEVNTTSVSVCDKAISYKNIQDMRISPAVKRPLWQTLRVIKEIIHIMGKAPSRIFIEMARAEDEKKWKTVSRKDRLLDLYKKCKDEIRNWSADIKKLGEEIKELSDGQLRSDKLYLYYTQMGRSMYTGKPICLGSLMAGADYDIDHIYPRSATGDDSLDNRVLVERTENAKKGDHYPLSIEIQGGRAVFWKVLLDKGFISKEKYRRLTRKTLLTDDEKAGFIGRQLVETRQSTKAIAEILKKAFPETKIIYTKARNVSRFRQYAEFVTVRDMNDYHHAKDAYLNIVVGNAFYTKFTSNPIHFLSEKNAVYSLNERTFYQFPIQRGSTMAWEPGDSGTMAVVRKWMDKNNILYTRMPFEEKGGLFDQNILKKGKGQVSLRARGALSDIQKYGGYNNATASYFMLVKAEKNGKTIYLLETVPLHLSGRLESIEDKINFCRELWHRDRKDYKNPVICIPKIYKQSLFEVDGFREHISAKTGNQFVMRNAEQLCLNAESAQIIKNVLKFNQRKQVQKELKITVHDKITEENLINIFETFISKIQTSIYRNKFEASVGLMIKGKGTFIELSMEDKCKCIGEILHLFQCNPVLSDLQLIGGKKASGRIYMGKRFDGNKKVFLVLQSVTGFFEKKILLAPYEKK

SEQ ID NO: 976 - protein, 2517 aa, synthetic construct
  REGION 1..2517: note = MG46-80 effector
MNTAVSKDSRGSDYYLGLDIGTASVGWAVANTDYELVKEHRKYLWGVRLFDTADTAAERRLHRAARRRHQRRLQRQRLLKEIFEDKISEVDPHFFERLKESSYHREDRSGNFLSTLFNDESFKDTDYFAKFPTIFHLRSHLIHHPEERPDIRILYLAIHSILKHRGHFLFPGESLESISSFSLLFDELLKNIETSLQCTLHVSCTPETFGTILKKKRRTDKKNDLQEVLTLTRTTEEEIEETPKKLTSELIKALSGTPFLLSMLFKNDSYKDSEQDKIEFDEEGFEDLKESIEVLLEPEEYALIETLEGIYNWTLLSDILNGEKFISDAKVASYRNHKDDLKQLKLLVKKYAGSAYYKAFKDPSIQNNYAHYIGTGNKSGKKVQVAHKGKCLQEDVNKYFHNLLKPYQNDEDRDLDNMLEKLEQKSALPKQRVRDNRVIPHQLHLKELQIILENAKAYYPFLTIPDDDGYTPTQKIISMMTFRIPYYVGPLNTSHMEKEGKEGFCWMVRQQGKEDVPIFPWNWTEVVDKNASAEKFITRMTNSCTYLFNEEVLPKFSLLYNRYMVLNELNNLKVNGEPISVELKQKIYNELFLHSGKKTITLKMLQKFLVVNNIVNKGDVTTIEGIDNGFANSLKSHIDFAPYLEANILSVEDVEKIIEWKAYYVDDATILKEKITQELHEKLTSEQIDDITKLVRNYKGWGRLSRAFLEDIYHVDRATGEGYSIIHMMWETNENLMELLSSKYDYLDEIQRINNETLINKKFSYESLVRPLSVSPPVKRQIWQTLLIVHELKKVMGKAPKRVFIEMAREEREKKRTTSRKESLRILYDRCKNDISFNKALLESLDTKTDTELRNDRLYFYYTQMGRCPYCGGKIELDQMNNTQLYDIDHIYPQSLIKDDSLNNRVLAHKACNGEKGNSYPINPQWQNTMIGFWKVLLDRSLISKEKYARLTRTTPLSDEELFAFINRQLVETRQSTKVVASILKNLFQDEGTEIVYVKARNVSSFRTDFEIKKSRLVNDHHHAHDAYLNIVVGNAYHTKFTGDARNFIKELKRGDQYYNASNIFSRSIQRNGRLAWIADERYDANKGRPKSEKQETGTIATIRKMLRNHQVLVTRQAMNTAVSKDSRGSDYYLGLDIGTASVGWAVANTDYELVKEHRKYLWGVRLFDTADTAAERRLHRAARRRHQRRLQRQRLLKEIFEDKISEVDPHFFERLKESSYHREDRSGNFLSTLFNDESFKDTDYFAKFPTIFHLRSHLIHHPEERPDIRILYLAIHSILKHRGHFLFPGESLESISSFSLLFDELLKNIETSLQCTLHVSCTPETFGTILKKKRRTDKKNDLQEVLTLTRTTEEEIEETPKKLTSELIKALSGTPFLLSMLFKNDSYKDSEQDKIEFDEEGFEDLKESIEVLLEPEEYALIETLEGIYNWTLLSDILNGEKFISDAKVASYRNHKDDLKQLKLLVKKYAGSAYYKAFKDPSIQNNYAHYIGTGNKSGKKVQVAHKGKCLQEDVNKYFHNLLKPYQNDEDRDLDNMLEKLEQKSALPKQRVRDNRVIPHQLHLKELQIILENAKAYYPFLTIPDDDGYTPTQKIISMMTFRIPYYVGPLNTSHMEKEGKEGFCWMVRQQGKEDVPIFPWNWTEVVDKNASAEKFITRMTNSCTYLFNEEVLPKFSLLYNRYMVLNELNNLKVNGEPISVELKQKIYNELFLHSGKKTITLKMLQKFLVVNNIVNKGDVTTIEGIDNGFANSLKSHIDFAPYLEANILSVEDVEKIIEWKAYYVDDATILKEKITQELHEKLTSEQIDDITKLVRNYKGWGRLSRAFLEDIYHVDRATGEGYSIIHMMWETNENLMELLSSKYDYLDEIQRINNETLINKKFSYESLVRPLSVSPPVKRQIWQTLLIVHELKKVMGKAPKRVFIEMAREEREKKRTTSRKESLRILYDRCKNDISFNKALLESLDTKTDTELRNDRLYFYYTQMGRCPYCGGKIELDQMNNTQLYDIDHIYPQSLIKDDSLNNRVLAHKACNGEKGNSYPINPQWQNTMIGFWKVLLDRSLISKEKYARLTRTTPLSDEELFAFINRQLVETRQSTKVVASILKNLFQDEGTEIVYVKARNVSSFRTDFEIKKSRLVNDHHHAHDAYLNIVVGNAYHTKFTGDARNFIKELKRGDQYYNASNIFSRSIQRNGRLAWIADERYDANKGRPKSEKQETGTIATIRKMLRNHQVLVTRQAVEVSGALFKLQPLRKKKNLLPLKGSSQTLQDTTKYGGYNAPATAYFALVQHEKKGKEVRQFVPVPILYAEQFKQNPGTLLKYCEEELDLINAKIVIPQILLHELVQLKGYTMSLSGITGPQTVANNEIQLVLSDEDYDYVAQIEKYLSLLKKVKDPEVQENAEILAESLHICKQDNLTLYELLLAKERGSIYRYRPANQAKFLEEKRSIFESLDIKGQCEVLVQIINLFTCTPESANLTKLGGGSSSGIVKFQSQITDKEARLIHQSPTGIFTKSRRVYEI

SEQ ID NO: 977 - protein, 1399 aa, synthetic construct
  REGION 1..1399: note = MG46-81 effector
MNTAVSKDSNQSEYYLGLDIGTASVGWAVTNAEYELVKKHRKHLWGVRLFDTANTAAERRLHRAARRRHQRRLQRQRLLKEIFQDKIDEVDPHFFKRLKESSYHTEDRSGSFLSILFNDESFKDTDYFTKFPTIFHLRSHLIHHPEEKPDIRILYLAIHSIMKHRGHFLFPGESLESVSSFNLLFDALLKNVEDSLQCALHVSCSPESLGAILKKKRRTDKKNELLKVLALTRTTEEEIEETPKKLITELIKALSGTPFLLSLLFENESYKESELDKIEFDKEGFEDKKDSIEVLLEPEEYALIETLEGIYNWTLLSDILNGEKFISDAKVSSYAEHKNDLKQLKLLVKKYAGSAYYKAFKDPSIQNNYAHYIGTGNKSGKKVQVVHKGKCLQEDVNKYLYNLLKPYQNDEDSILGSMLEKLEQKSALPKQRVRDNRVIPHQLHLKELQVILDNAQHYFPFLAIPDADGYTPHQKIVSMLTFRIPYYVGPLNTSHMEKGGNEGFCWMVRQQGKEDVPIFPWNWSDVVDKNASAEKFITRMTNSCTYLFNEEVLPKYSLLYNRYMVLNELNNLKINGEPISVELKQKIYNELFLKSGKKTITLKMLQKFLMTNNIINKGDTSTIEGIDNGFANSLKSYIDFAPYLETKILSGEEIEKIIEWKAYYVDDATILKEKIAQELHEKLTSEQIDDIAKLVRNYKGWGRLSRAFLEDIYHVDRATGEGYSIIHMMWETNENLMELLSSKYDYLDEIQRINNETLINKKFSYESLVKPLSVSPPVKRQIWQTLLVVHELKKVMGKAPKRVFVEMAREEREKKRTTSRKESLRILYDRCKNDITFNNALLESLETKTDAELRNDRLYFYYTQMGRCPYCGGKIELDQMNNSQLYDIDHIYPQSLIKDDSLNNRVLAHKTCNGGKGNSYPINPQWQNKMIGFWKVLLDRSLISKEKYARLTRTTPLSEEELFAFINRQLVETRQSTKVVASILKNLFQDEKTEIVYVKARNVSSFRADFEIKKSRLVNDHHHAHDAYLNIVVGNAFHTKFTADARNFIKELRRGDQFYNASNIFSRSIQRNGRSAWIADERYDDNRGKPKSEKQETGTIVTVRKTLRNHQVLVTRQAVEVSGALFKLQPLKKKKNLLPLKGSSQILQDTTKYGGYNAPATAYFALIEHEKKGKPVRQLVPVPILYAEQFKQDAKGLAKYCEENLDLENAKMIVPQILLHDKVQLKGFTMSLSGVTGPQIIANNEIQLVLSDEHYDYVAQTEKYLSLLKKVKDTEVEKNAEILAESLHITRQDNLQLYEQLLAKERDSIYKYRPANQAKFLEEKKSTFESLDIKAQCEVLVQIINLFTCTPESANLEKLEGGSSSGIVKFHSQITDREAKLIHQSPTGIFTKTRRIYEL

SEQ ID NO: 978 - protein, 1399 aa, synthetic construct
  REGION 1..1399: note = MG46-82 effector
MNTAVSKDSRGSDYYLGLDIGTASVGWAVTNTDYELVKEHRKYLWGVRLFDTADTAAERRLHRAARRRHQRRLQRQRLLKEIFEDKISEVDPHFFERLKESSYHREDRSGNFLSTLFNDESFKDTDYFAKFPTIFHLRSHLIHHPEERPDIRILYLAIHSILKHRGHFLFPGESLESISSFSLLFDELLKNIETSLQCTLHVSCTPETFGTILKKKRRTDKKNDLQGVLTLTRTTEEEIEETPKKLTSELIKALSGTPFLLSMLFKNDSYKDSEQDKIEFDKEGFEDLKESIEVLLEPEEYALIETLEGIYNWTLLSDILNGEKFISDAKVASYRNHKDDLKQLKLLVKKYAGSAYYKAFKDPSIQNNYAHYIGTGNKSGKKVQVAHKGKCLQEDVNKYFHNLLKPYQNDEDRDLDNMLEKLEQKSALPKQRVRDNRVIPHQLHLKELQIILENAKAYYPFLTIPDDDGYTPTQKIISMMTFRIPYYVGPLNTSHMEKEGKEGFCWMVRQQGKEDVPIFPWNWTEVVDKNASAEKFITRMTNSCTYLFNEEVLPKFSLLYNRYMVLNELNNLKVNGEPISVELKQKIYNELFLHSGKKTITLKMLQKFLVVNNIVNKGDVTTIEGIDNGFANSLKSHIDFAPYLEANILSVEDVEKIIEWKAYYVDDATILKEKITQELHEKLTSEQIDDITKLVRNYKGWGRLSRAFLEDIYHVDRATGEGYSIIHMMWETNENLMELLSSKYDYLDEIQRINNETLINKKFSYESLVKPLSVSPPVKRQIWQTLLIVHELKKVMGKAPKRVFIEMAREEREKKRTTSRKESLRILYDRCKNDISFNKALLESLDTKTDVELRNDRLYFYYTQMGRCPYCGGKIELDQMNNTQLYDIDHIYPQSLIKDDSLNNRVLAHKACNGEKGNSYPINPKWQNTMIGFWKVLLDRSLISEEKYARLTRTTPLSDEELFAFINRQLVETRQSTKVVASILKNLFQDENTEIVYVKARNVSSFRTDFEIKKSRLVNDHHHAHDAYLNIVVGNAYHTKFTRDVRNFIKELKRGDQYYNASNIFSRSIQRNGRLAWIADERYDANKGRPKSEKQETGTIATVRKMLRNHQVLVTRQAVEVSGALFKLQPLRKKKNLLPLKGSSQTLQDTTKYGGYNAPATAYFALVQHEKKGKEVRQFVPVPILYAEQFKQNPGTLLKYCEEELDLINAKIVIPQILLHELVQLKGYTMSLSGITGTQIIANNEIQLVLGEEQYDYIAQIEKYLSLLKKVKAPEIKENAEILAESLHICKQDNLTLYELLLAKERDSIYRYRPANQAKFLEEKRSVFESLDIKGQCAVLVQIINLFTCTPESANLTKLGGGSSSGIVKFQSQIADKEARLIHQSPTGIFTKSRRVYEI

SEQ ID NO: 979 - protein, 1399 aa, synthetic construct
  REGION 1..1399: note = MG46-83 effector
MNTAVSKDSRGSDYYLGLDIGTASVGWAVANTDYELVKEHRKYLWGVRLFDTADTAAERRLHRAARRRHQRRLQRQRLLKEIFEDKISEVDPHFFERLKESSYHREDRSGNFLSTLFNDESFKDTDYFAKFPTIFHLRSHLIHHPEERPDIRILYLAIHSILKHRGHFLFPGESLESISSFSLLFDELLKNIETSLQCTLHVSCTPETFGTILKKKRRTDKKNDLQEVLTLTRTTEEEIEETPKKLTSELIKALSGTPFLLSMLFENDSYKDSEQDKIEFDKEGFEDLKESIEVLLEPEEYALIETLEGIYNWTLLSDILNGEKFISDAKVASYRNHKDDLKQLKLLVKKYAGSAYYKAFKDPSIQNNYAHYIGTGNKSGKKVQVAHKGKCLQEDVNKYFHNLLKPYQNDEDRDLDNMLEKLEQKSALPKQRVRDNRVIPHQLHLKELQIILENAKAYYPFLTIPDDDGYTPTQKIISMMTFRIPYYVGPLNTSHMEKEGKEGFCWMVRQQGKEDVPIFPWNWTEVVDKNASAEKFITRMTNSCTYLFNEEVLPKFSLLYNRYMVLNELNNLKVNGEPISVELKQKIYNELFLHSGKKTITLKMLQKFLVVNNIVNKGDVTTIEGIDNGFANSLKSHIDFAPYLEANILSVEDVEKIIEWKAYYVDDATILKEKITQELHEKLTSEQIDDITKLVRNYKGWGRLSRAFLEDIYHVDRATGEGYSIIHMMWETNENLMELLSSKYDYLDEIQRINNETLINKKFSYESLVKPLSVSPPVKRQIWQTLLIVHELKKVMGKAPKRVFIERAREEREKKRTTSRKESLRILYDRCKNDISFNKALLESLDTKTDTELRNDRLYFYYTQMGRCPYCGGKIELDQMNNTQLYDIDHIYPQSLIKDDSLKNRVLAHKACNGEKGNSYPINPQWQNTMIGFWKVLLDRSLISKEKYARLTRTTPLSDEELFAFINRQLVETRQSTKVVASILKNLFQDENTEIVYVKARNVSSFRTDFEIKKSRLVNDHHHAHDAYLNIVVGNAYHTKFTRDVRNFIKELKRGDQYYNASNIFSRSIQRNGRLAWIADERYDANKGRPKSEKQETGTIATVRKMLRNHQVLVTRQAVEVSGALFKLQPLRKKKNLLPLKGSSQTLQDTTKYGGYNAPATAYFALVQHEKKGKEVRQFVPVPILYAELFKQNPGTLLKYCEEELDLINAKIVIPQILLHELVQLKGYTMSLSGITGPQTVANNEIQLVLSDEDYDYVAQIEKYLSLLKKVKDPEVQENAEILAESLHICKQDNLTLYELLLAKERGSIYRYRPANQAKFLEEKRSIFESLDIKGQCEVLVQIINLFTCTPESANLTKLGGGSSSGIVKFQSQITDKEARLIHQSPTGIFTKSRRVYEI

SEQ ID NO: 980 - protein, 1360 aa, synthetic construct
  REGION 1..1360: note = MG46-84 effector
MNKDLNNIDYYIGLDCGTSSVGFAVTDTNYNILKFNGKRMWGSHLFEEAKTAAGRRGFRTARRRLERRRKRILLLQEIFAEEICKVDPTFFIRLNDSKYILEDKTTPDLNILFNDKNYKDKDFFKIYPTAYHLRKALMTEDIKDPRLLYLGIQHILKNRGHFLFPGEGMKAVESIKPLVDDIQNVFEELFDDVTFEYTSIEKLQEALMSKRNSEKKEKLEKEIIISDTKLKASVVRILLGYKVKTTTLFKKEGDEIPDVEFKKASFEESDLPELQDRLSDEEFAFIKAAKGIYDWTLLGSIMSGHLYISDAKIELFDSNKADLKHLKEAIKTYAPDKYESFFHSDEKGSYSSYTGKIHGDHVVKRVKRTGTDEFYKKIKNLLEKVPKDDEHVKHILDAIENDSFMPLLKSFRNGTIPYQMNKIELDAILANCSKNFEFLEKKDPDGFSATEKIKELLKFRVPYYVGPLGSNPYGKETKGKNSWVERKTSGRVLPWNIEQKIDYESSAEKFIERMTNKCTYCKDQDVLPKNSLEYSKYMVLNELNNLRICGDRLSVPRKQEIFNELFKKEKKVSISKLTKYINDNCWYSGKIKKEDITGIDGDLKASLSSYFDFKDFLESHRLKADDVDRIIKWATVFSEGGDMLRKRIEREFGEVLTKEEIDKTSKLKYAGWGRFSHKFLYEIQAINKETGELMSVMRMLWETQNNLMELLSNKYEFIEQITKPKTIGKLDYSIVDEMYVSPAVKKETWQTLRIVDELIRIMGHNPQKVFVEVTRSEQEKKRTVSRKQTLIDTLKDATKTDSNYINELRELISKLEEKSESDVSRQDKLYLYFSQCGKCMYTGERIDIEDIYDINNYDIDHIFPRSRTNDDSLTNRVLVKRKKNGGKSDVYPIDDSIRKKMQNFWKFLYEKKFIPKEKYDRLVRTSPLSDEEIKGFINRQLVETSQTVKQVTDTLKSLFGEETKVVYSKARNVSDFRNKFGFVKCRTMNDLHHAKDAYLNIVVGNVYDTKYSSNFYLQANGHGYGNLTKPFDFDVKNAWKAENDGTIASVTKTMNRNDILFTRQPVETKGELFKVQLVKKGSRKGALPAKVSDKKLQSAIGSFENTEGAYDNWTSKYGGYNSLSTSYFAVIKHEEKSNKFVSFVPISMIDAKRIGKPEALLKYCTTTLGLINPTIVRSKLLINTQLKIDGYLFAITGKSTGGKALTLSSNVPLVLSAQSQQTVKNIESFFKKSEKNKDLQPTPKFDKISTENTLDLYCELQKKSKSPIYNKRPGNQSDVLENGVSLFEKLSLLERCKAIREILNYYAMEGNGQSDFTAIGGSKTCGKLTKKAGFDITKSNILIFDQSITGLFEEIEEIKA

SEQ ID NO: 981 - protein, 1378 aa, synthetic construct
  REGION 1..1378: note = MG46-85 effector
MKEIKKIFIGLDMGTTSVGWAATDENYEVIKKNGKALWGIRLFDEAQTAEDRRMHRIARRRIERRSRRIDLLQELFAQEICKKDPGFYERLNESGLYEEDKRVHQTNSLFNDVDFNDKAYYKKYPTIYHLRHALMTENHPFNVRLVYLAIHHILKHRGHFLFENFQTDEKGTSGFDESFAAFGSALDRIKGSSPDVRKADSMKDILKDKKLGVKEKAASLLQCLGQGKEKDFKAMMTLAAGGTASLSDIFNDEKLKDFEKNKVNFSSAQFEENEPDIMAELGDRYDLIAALHGLYNWSLLAELMGEYHYISEAKIAVYDKHKADLKVLKRVLKQRPDIYAKIFREPGSSANKNYSAYVGVCKVKGKKAAIEKCSYEDFTKTLKSCLKDMPDSNDKDYISRELNMGTFLPKSVSKENGVIPYQLHLQELKIILSKAEAYLPFLKVKDQYGTVSDKIISLFTFRIPYYVGPINEHAGSCWVVKKDKQGKVYPWNFTEKIDIEKSAEGFIRNLTNKCTYLIGEDVLPKNSLLYSEFTVLNELNNVRIGETMQKLPLSLKEKVMDNLFSCYKHVSRTKFIKYLVSEGIDKKEAESISGLDGDFKSSLSSLIDMKHILGNDFSREDAEKMIQDITIFGGDKKMLKNRLHREFSYLTSEQLTSLTRLSYDGWGRLSREFLVNLLPAEGDSCEVLVDHTSGEVLNIISAMRQTSYNLMELLGSRFGYGQAIEERNRKEEGQGRITYKDVEDLYISPAVRRPLWQALKIVREIVKITGKEPSKIFIEMARENGEKGRRTISRKARLQALYKKCRDDTRDWAKELEGKSEEDFRSDRLYLYYTQMGRSMYTGKPIDINRLFDRNVYDIDHIYPQSLTGDDSLDNRVLVEKTVNAKKGDTYPLSSALDGCYISGQQIRIQDIQKEMRPFWHMLLEKELISKEKYNRLSRTIPLSDAEKAAFIGRQLVETRQSTKACAELLSKAYPQTRIVYTKAGNASRFRQYGGFIKVRDMNDYHHAKDAYLNIVVGNVFDTRFTANPLHFLKGNHQAYSLNTEALYGHKVSRSGVDAWIPAEKDEKGQVIEGHEGTMGTVRKWMRKNNILFTRMPYERKGELFKENILKKGKGQVPIKGNSPVSDIKKYGGYNMAKVAYMMLVKREEKGKSVYLLESIPIYLKESLKTDNERLEYCKKIWDAQGDKYINPEICISKILFQSLLEIDGFKAHISRKTNNRFAMRNAQELCMDNALAGVLKNVLKFIHRKTVQKDAVITEYDGVSDDNTLALYDLFVKKLSSSIYRKKYATQADFLCQSKDKFKNLPLEERCEVLGSILHLFQCNPVLSDLHLLGGKKSTGTILLNKKIKPEDHVYLIEQSVTGFFEKRILLAPLGEK

SEQ ID NO: 982 - protein, 1345 aa, synthetic construct
  REGION 1..1345: note = MG46-86 effector
MKNEKKSFGEYYLGIDAGTDSVGWAVTDGNYNVLKFHGKAMWGVRLFEEAQTAADRRAFRTARRRQGRKVQRTKLLQELFAEEICKKDSAFFIRMADSKYYAEDKTEPQQNALFNDVDYTDKDYHKEYPTVYHLRRAFIEGKDIRDPRLLYLAVHHIINNRGHFLFEGMDLSKVVDFETPFSVLKEYLREEDFGFDFSNIDADALKESLKTKQGITQKKKDLYKLLGKEKGTLKSVCDLLAGGSGIKLTDLFNDESLAGETPEKISLADSSIEDDRTALENILQDRIQLLDCLKAVYDWAILDEILSGSPYISFAKTQSYEKHKKDLALLKKTIKRLCPEKYKEVFKSPNTANNYCAYSGMCVINGKKTAIEKRTTASDFGKYIAKLLSSFDDPDAKDILRQIDAQTFMPKQRTGENSVLPYQVHKVELEKILGNAEMNFPFLLKKDDSNLTVKDKIIKLLTFRIPYYVGPLNDKHRNSGFCWIVRKNTEDTSRILPWEFEQKVDLYASAEQFINRMTNKCTYLVGEDVLPKDSLLYSKYSVLNELNNLKLNGEPLKQEDKENIIKEIYEKKNKVKIKDIANYYKRNGFDVKPDDFTGFHEELKSSLRSYNLFFSLRGEKLDESAVEEAIRAVVLFGNDKKMLSQRLRNIKNGFFSETEINRISGFKFSDWGRLSKKLLTGIKETGETFNIIEALRVTNKNLMQLLSSEFDFKKKIDEENEKINGGIPEFSYDTLVKDSYASPAVKRSIWQVLTIAKEIEKITGHAPKKIFMETTREDREKKATKSRKKQLVELYKKCREETSELLKTLEKREDSELRNNALYLYYTQMGKCMYSGETIELEHLFDKNVYDIDHIYPQSKTKDDSLNNKVLVKKELNGQKSDRYPVPRDVLSPGIENHWKCLRSAGLISEEKYKRLTRRTNFSDTELSGFIARQLVETNQATKAAAEILKRVYPETRLVYSRASNVDVFKKRYDILKVREVNDYHHARDAYLNIVVGNVFDVKFTMNPLNFIKGGGTYSLNENMYDSDIRRGNNVAWVAGNNGTIATVKKTCSKENILFTRYAFEQKGGLFDQQIMKKGKGQLPTKPSDPHMQGQTEQEWIDKYGGYNKLSGAYFCLVEYKDKGKTVRSIESVPLLVSAKIKNDPSELEKYLKQALGTEELSVRIREIKFNTLFNHNGFLMHITGRTGDQLVFKPALQLKVNASDYAYIKKIVRFCEREKESKKAFTVSGFDGIEKDRNIELFDFFTKKLSSDIFMVHHEPTLKSLLANRNIFVDMSVEMQARTIYQILHIFRCNRMLADLTALQGAKSAGIVRMSKRISSKDKTMIINQSPTGLFENSVDLLTV

SEQ ID NO: 983 - protein, 1332 aa, synthetic construct
  REGION 1..1332: note = MG46-87 effector
MSIMKEINEYYLGLDMGEGSLGWAVTTPDYHVVKKAGKALWGVRLFELAKTAKERRVFRTGRRRIERRNQRIDFLQELFSEAVCEKDPGFYQRLNDSRLWEEDKTERQINSLFNDVDFTDKSYHKKFPTIYHLRQKLMDDSCEFDVRLVYLAIHHILKHRGHFLLENFEIREDGAVGFEEAMADLGNVLGQFLDRSLPVENNDACKEILKNRKLNKLEKLEQLGKLYDAGGDKSIKEIFRLIVGGTAHLAVIFCDETLKNTERGKISFEDAQYEEYKNDVQTILDDRFDVVAACETLHNWAILAELMGNYKYISDAKVAIFNEHRKDLTVLKRLLKRDSNVYTKMFRMAGKNSYSAYVGLCKIHGKKVPIEKACTQGDFAGEIKKIIKNFPDSEDKKYILDKIERNELLPKAVSKQNGVIPYQLHLVELNKILSNAERYLPFLKKEDEYGTVSDKIRKLFTFRIPYYVGPLNGHSPFAWAVRKDGNGHIYPWNFERKIDIEASAEEFIRRMTNKCTYFVKKDVLPKNSLLYTEFMVLNELNNVRIGSAQEKLPPGMKARVWERLFLKDKKITAKKMCSYLIREEHISKEEAAQISGIERDFKASLAPWIDMRKILGDNFTVSDSEIIIKDITLFGADKKILRRRLKARFGYLEDCQVKELVRLPYQGWGRLSKEFLTQILPKAERDSTVLVDQETGEVMNIITALKKTDHNLMELLSGKFGYSAALSEVNTTSVSVCDKAISYKNIQDMSISPAVKRPLWQTLRVIKEIIHIMGKAPSRIFIEMARAEDEKKWKTVSRKDRLLDLYKKCKDEIRNWSADIKKLGEEIKELSDGQLRSDKLYLYYTQMGRSMYTGKPICLGSLMAGADYDIDHIYPRSATGDDSLDNRVLVERTENAKKGDHYPLSIEIQGGRAVFWKVLLDKGFISKEKYRRLTRKTLLTDDEKAGFIGRQLVETRQSTKAIAEILKKAFPETKIIYTKARNVSRFRQYAEFVKVRDMNDYHHAKDAYLNIVVGNAFYTKFTSNPIHFLSEKNAVYSLNERTFYQFPIQRGSTMAWEPGDSGTMAVVRKWMDKNNILYTRMPFEEKGGLFDQNILKKGKGQVSLRARGALSDIQKYGGYNNATASYFMLVKAEKNGKTIYLLETVPLHLSGRLESIEDKINFCRELWHRDRKDYKNPVICIPKIYKQSLFEVDGFREHISAKTGNQFVMRNAEQLCLNAESAQIIKNVLKFNQRKQVQKELKITVHDKITEENLINIFETFISKIQTSIYRNKFEASVGLMIKGKGTFIELSMEDKCKCIGEILHLFQCNPVLSDLQLIGGKKASGRIYMGK

SEQ ID NO: 984 - protein, 1395 aa, synthetic construct
  REGION 1..1395: note = MG46-88 effector
MMKEFKNYFIGLDMGTTSVGWAVTDENYEIIKKNGKALWGIRLFDEAQTAEDRRMHRIARRRIERRSRRIDLLQELFAQEICKKDPGFYERLNESGLHEEDKSIRQANSLFNDDDYDDKAYHKKYPTIYHLRHALMTENHPFDVRLVYLAIHHILKHRGHFLFENFQVDENGVSGFEESFAAFGNALEHIKGESLDMGKEEEMKALCKDKKLGVKHKALALAQCLGRSKDNDFKDMMSLAAGGQATLSKIFKDEGLKDFSKNKVSFSDSQFENDKPEIIAKLGDRYDLIAALHDLYNWSFLAELMRGHKYISEAKIEIYDKHKEDLALLKKVLKQDRSAYNRMFKEPKDEEPKGKKTKEKTTNYSDYVKACKTNGKKLPFPYKKFNHEEFIKTVKSCLKNIPDSPDKKNIENKLEEGTFLPKAVSVENGAIPYQLHLQELKIILSKAEAYLPFLKVKDQYGTVSDKVISLFTFRIPYYVGPINEHAGSCWVVKKDKQGKVYPWNFTEKIDIEKSAEGFIRNLTNKCTYLIGEDVLPKNSLLYSEFTVLNELNNVRIGETMQKLPLSLKEKVMDNLFSCYKHVSRTKFIKYLVSEGIDKKEAESISGLDGDFKSSLSSLIDMKHILGNDFSREDAEKMIKDITIFGGDKKMLKSRLHREFSYLTSEQLTSLTRLSYDGWGRLSREFLVNLLPAEGDSCEVLVDHTSGEVLNIISAMRQTSYNLMELLGSRFGYGQAIEERNRKEEGQGRITYKDVEDLYISPAVRRPLWQALKIVREIVKITGKEPSKIFIEMARENGEKGKRTISRKARLQALYKKCRDDTRDWAKELEGKSEEDFRSDRLYLYYTQMGRSMYTGKPIDINRLFDRNVYDIDHIYPQSLTGDDSLDNRVLVEKTVNAKKGDTYPLSSALDGCYISGQQIRIQDIQKEMRPFWHMLLEKELISKEKYNRLSRTTSLSDAEKAAFIGRQLVETRQSTKACAELLSKAYPQTRIVYTKAGNASRFRQYGGFIKVRDMNDYHHAKDAYLNIVVGNVFDTRFTANPLHFLKGNHPVYSLNTEALYGHKVSRNGVDAWIPAEKDEKGQVIEGHEGTMGTVRKWMRKNNILFTRMPYEGKGELFDQNIVKKKKGEKKKGKVPIKSKPPISDIEKYGGYNNASIAYIMLVQAEEKGKPVYLLESIPNYVKNKLTSDKERQEYCVMTWTAQKNKYRNPQILIPKIRKQSLFEIDGFKAHISRKTDNRFAMRNAQELCMDNAQAKVLKNILKFIQRKKVQKNAAITEYDGISDDNTLALYDCFVDKLSSSIYGKEFAMQADFLRQSKNKFTNLSLEERCEVLGSILHLFQCNPVLSDLRLLGGKKSTGTIRLNKKIKPEDHVYLIEQSITGFFEKRILLAPFGEK

SEQ ID NO: 985 - protein, 1349 aa, synthetic construct
  REGION 1..1349: note = MG46-89 effector
MKNEKKSFGEYYLGIDAGTDSVGWAVTDENYNVLKFHGKAMWGVRLFEEAQTAADRRAFRTARRRQGRKVQRTKLLQELFAEEICKKDSAFFIRMADSKYYAEDKTEPQQNALFNDVDYTDKDYHKEYPTVYHLRRAFIEGKDIRDPRLLYLAVHHIINNRGHFLFEGMDLSKVVDFETPFSVLKEYLREEDFGFDFSNIDADALKESLKTKQGITQKKKDLYKLLGKEKGTLKSVCDLLAGGSGIKLTDLFNDESLAGETPEKISLSDSSIEDDRTALENILQDRIQLLDCLKAVYDWAILDEILSGSPYISFAKTQSYEKHKKDLALLKKTIKRLCPEKYKEVFKSPNTANNYCAYSGMCVINGKKTAIEKRTTASDFGKYIAKLLSSFDDPDAKDILRQIDAQTFMPKQRTGENSVLPYQVHKVELEKILGNAEMNFPFLLKKDDSNLTVKDKIIKLLTFRIPYYVGPLNDKHRNSGFCWIVRKNTEDTSRILPWKFEQKVDLYASAEQFINRMTNKCSYLVGEDVLPKDSLLYSEYSVLNELNNLKLSGESLAQSDKAEIIDELYKKNNKVKIKDIANYYKRKGFEVKPDDFTGFHEELKSSLRSYNMFFNILRDRFDESAVEAAIKAIVLFGNDKKMLLQKLRSIKNGYFTEEEIKRMAGFKFSDWGRLSEKMLTGIYSVNKETGEAFNIIEALRTTDKNLMQLLSAELDFKKQIDAENEKINGGIPEFSYDALVKDCYASPAVKRSIWQVLTIAKEIEKITGHAPKKIFMETTREDREKKATKSRKKQLVELYKKCREETSELLKTLEKREDSELRNNALYLYYTQMGKCMYSGETIELEHLFDKNVYDIDHIYPQSKTKDDSLNNKVLVKKELNGQKSDRYPVPRDVLSPGIENHWKCLKAAGLISEEKYKRLTRRTNFSDTELSGFIARQLVETNQATKAAAEILKRVYPETRLVYSRASNVDVFKKRYDILKVREVNDYHHARDAYLNIVVGNVFDVKFTMNPLNFIKGGGTYSLNENMYDSDIRRGNNVAWVAGNNGTIATVKKTCSKENILFTRYAFEQKGGLFDQQIMKKGKGQLPTKPSDPHMQGQTEQEWIDKYGGYNKLSGAYFCLVEYKDKGKIVRSIESVPLLVSAKIKNDPSDLEKYLKQALGTEELSVRIREIKFNTLFNHNGFLMHITGRQGNQLIFKPALQLKVNASDYAYIKKIVRFCEREKESKKAFTVSGFDGIEKDRNIELFDFFTKKLSSDIFMVHHAATLKSLLANRSIFVDMSVEMQARTIYQILHIFRCNRMLADLTALQGAKSAGTVLMSKKISLNDKIMIINQSPTGLFENSVDLLTV

SEQ ID NO: 986 - protein, 1393 aa, synthetic construct
  REGION 1..1393: note = MG46-90 effector
MMKEIKNYFIGLDMGTTSVGWAATDENYEIIKKNGKALWGIRLFDEAQTAEDRRMHRIARRRIERRSRRIDLLQELFAQEICKKDPGFYERLNQSGLHEEDKKVHQPNSLFNDVDFNDKAYHKKYPTIYHLRHALMTENHPFDVRLVYLAIHHILKHRGHFLFENFQVDENGVSGFEESFAAFGNALEHIKGESLDMGKEEEMKALCKDKKLGVKHKALALAQCLGRSKDNDFKDMMSLAAGGQATLSKIFKDEGLKDFSKNKVSFSDSQFENDKPEIIAKLGDRYDLIAALHDLYNWSFLAELMRGHKYISEAKIEIYDKHKEDLALLKKVLKQDRSAYNRMFKEPKDEEPKGKKTKEKTTNYSDYVKACKTNGKKLPFPYKKFNHEEFIKTVKSCLKNIPDSPDKKNIENKLEEGTFLPKAVSVENGAIPYQLHLQELKIILSKAEAYLPFLKVRDQYGTVSDKIISLFTFRIPYYVGPINEHAGSCWVVKKDKHGKVYPWNFTEKIDIEKSAEGFIRNLTNKCTYLIGEDVLPKNSLLYSEFTVLNELNNVRIGETMQKLPLSLKEKVMDHLFSCYKHVSRTKFIKYLVSEGIDKKEAESISGLDGDFKNSLSSLIDMKHILGNDFSREDAEKIIKDITIFGGDKKMLKNRLQREFSYLTPEQLTSLTQLSYDGWGRLSKEFLVNLLPAEGNSCEVLVDHTSGEVLNIISAMRQTSYNLMELLGSRFGYGQAIEERNRKEEGQGRITYKDVEDLYISPAVRRPLWQALKIVREIVKITGKEPSKIFIEMARENGEKGKRTISRKARLQALYKKCKDDTRDWTKELKGKPEEDFRSDRLYLYYTQMGRSMYTGKPIDINRLFDRNVYDIDHIYPQSLTGDDSLDNRVLVEKTVNAKKGDTYPLSSALDGCYISGQQIRIQDIQKEMRPFWHMLLEKELISKEKYNRLTRTIPLSDAEKAAFIGRQLVETRQSTKACAELLSKAYPQTRIVYTKAGNASRFRQYGGFIKVRDMNDYHHAKDAYLNIVVGNVFNTRFTANPLNFLKGNHQAYSLNTEALYGHKVSRNGVDAWIPAEKDEKGQVMAGHEGTMGTVRKWMRKNNILFTRMPYEGKGGLFDQNIMKKEKGQVPIKGDSPISNIKKYGGYNKAKVAYFVLTQSKLNKKTVYTLEAIPLILKNSIQSNEDKETYIQKQWRKNGKKMEHPIVCLGHIPVQSLLEINGFKVHLSGKNGKDILLRNAEQLCINEADTAVLKKILKFNQRAAMSKKGEEIFINSFDNIQEEDLNRLYHVFEDKLTNQIYKVKLEKQAAVLKKGEETFNRLSPEQKCKLIGEILHLCQCKATHADLRLIGGAKKAGILTMGTQIYPKDHVYLIEQSVTGFFEKRILLAPFGEK

SEQ ID NO: 987 - protein, 1357 aa, synthetic construct
  REGION 1..1357: note = MG46-91 effector
MNKDLNNIDYYIGLDCGTSSVGFAVTDTNYNILKFNGKRMWGSHLFEEAKTAAGRRGFRAARRRLERRRKRILLLQEIFAEEICKVDPTFFIRLNDSKYILEDKTTPDLNILFNDKNYKDKDFFKIYPTAYHLRKALMTEDIKDPRLLYLGIQHILKNRGHFLFPGEGKKAVESIKPLVDDIQNVFEELFDDVTFEYTSIEKLQEALMSKRNSEKKEKLEKEIIISDTKLKASVVRILLGYKVKTTTLFKKEGDEIPDVEFKKASFEESDLPELQDRLSDEEFAFIKAAKGIYDWTLLASIMSGHLYISDAKIELFDSNKADLKHLKEAIKTYAPDKYESFFHSDEKGSYSSYTGKIHGDHVVKRVKRTGTDEFYKKIKNLLEKVPKDDEHVKHILDAIENDSFMPLLKSFRNGTIPYQMNKIELDAILANCSKNFEFLEKKDPDGFSATEKIKELLKFRVPYYVGPLGSNPYGKETKGKNSWVERKTSGRVLPWNIEQKIDYESSAEKFIERMTNKCTYCKDQDVLPKNSLEYSKYMVLNELNNLRICGDRLSVPRKQEIFNELFKKEKKVSISKLTKYINDNCWYSGKIKKEDITGIDGDLKASLSSYFDFKDFLESHRLKADDVDRIIKWATVFSEGGDMLRKRIEREFGEVLTKEEIDKTSKLKYAGWGRFSHKFLYEIQAINKETGELMSVMRMLWETQNNLMELLSNKYEFIEQITKPKTIGKLDYSIVDEMYVSPAVKKETWQTLRIVDELIRIMGHNPQKVFVEVTRSEQEKKRTVSRKQTLIDTLKDATKTDSNYINELRELISKLEEKSESDVSRQDKLYLYFSQCGKCMYTGERIDIEDIYDINNYDIDHIFPRSRTNDDSLTNRVLVKRKKNGGKSDVYPIDDSIRKKMQNFWKFLYEKKFIPKEKYDRLVRTSPLSDEEIKGFINRQLVETSQTVKQVTDTLKSLFGEETKVVYSKARNVSDFRNQYGFVKCRSMNDLHHAKDAYLNIVVGNVYDTKYSSNFYLQANGHGYGNLTKLFDFDVKNAWKVGASGTLSVVAKTMNRNDILFARQPVTKSGQLFDLQLVKKGAKKGALPAKVSDKKLQSAIESFKNKETAYDNWTAKYGGYNSLATSHFAVIKHEEKNKRFVSFVPISMIDAKRLEKPEALLEHCTTTLGLINPTIVRSKLLINTQLKIDGYLFAIAGKTEDRITLKSNVPLLLDNDSQKTLKKLESFNRKKTQFRGIAISSEHDGITEENITNLYEALMKKSNSKIFSIRPASQAKLITEKYGTFKKLSLQDKCSVVTSLLDYFGMTGGVSDLKLLGGKSSVGAIKKPGKYNTTNSSIKIVDQSITGLFEEIEEIKA

SEQ ID NO: 988 - protein, 1402 aa, synthetic construct
  REGION 1..1402: note = MG46-92 effector
MKKRIYCDYYIGIDAGTDSVGWAVTDEYYNILKFRDKTMWGIRLFDEANPAAERRTHRTQRRRYGRRAQRTKLLQELFAEEITKKDPGFFLRMKESKYLPEDRKYDFKYLLFNDDNYTDGDFHKDYPTAYRLRKAFLDGKNISDPRLLYLAVHHIIINRGHFLFDGVNVENVTKFETVFNSLVEYINDNFDSESDIKKITDVDTAKFSEILKSKNTVTAKKEALYELFGVKKGQLKAVCDLLTGSSSVKLSDLFDNETLNSAENIKIIFSDSSYRDNHDIYEEVLEDKVEFTDYLKAVYDWSVLADILGEHEYISEVKDSEYEQYGEDLKKLQRAVKKYCPDRMNSFFYSPDNGRNYCAYAGSCNTGGKKYSRLKWKKKDNEKKKTVQECFYKVVKEMLNEHLDDEDVKYIFDRIADGSFLIKLRTSKNCIFPYQLNELELRKILKNAENNFPFLKEKDESGLTVSDKIMKLLTFRIPYYVGPLNDEHKGKNSNCWMVRRDNSKDRITPWNFENKVDIEQSAQEFIFRMTNKCTYLYGEDVLPKNSLLYSEYEVLNELNNLSLNGERLNVEDKKDIIEKVFKQKNKVKIKDIVNYYRSVGKEVSADDFSGLSDMKEFKSSLKSYRDFDKILGGRFNYNYAEEAILAVLLFSGDKKILTSRLKKIGGGYFTDDEIKKISSLRYSDWGRFSKKLLTGVYSAYSQTGEYMNIITAMRETTCNFMETQGQNFGFKDEIQKINSEVMPKINEFSYDALVKDLYVSPKIKRSVWQTLLIVREIVKITGHEPKKIFIEMARGTDGTSKTPDSRKKKLQDFYKNCQKEKFEIIKSIDFEGLNQSLKARDDSELRSDKLYFYYSQLGRDMYTGEEISLDNFSNYDKDHIYPRSLTKDDSLDNLVLVKKTINQDEKKAVYPIPNGIIKPKARELWEVLLKNGLISKEKYYRLTRTTEFSLEERASFVNRQIIETQQSTKAVVNVLKQVFPKSAVVGVKAGIVKDFKDKYKIEKVRMVNDNHHAKDAYVSIISGNVFDTKFKHNVWAYFKNNDFEKYTLNTSIYDSNVGSKEKPAWKGGANGSIKTIKKIIADEQSILYTRYAFIRDGSFFDENLNPKPKPKSKSTLIPSKTGDEHLINQSDREIVKKYGGYSSKYAYFYLVEDSDETRSIVSVPAYLADSAEKDSAVLKNYLKNYAKIKEPKILMKKIKIGTLFCIDGFRVYLSGRKSEDDLRFKPGVQLVLPEDMYNYSKKIEVFMKHYPKFVENELNESEIDYYKFDSNKNLKLYDFFLERLLDNPFCKYARTKNSKSDYEQLNEKRTDFINLSMYKQVVVLFRLFKIFRCNAECAKFEDNFDTNFKIEGNLGEMFGNKKIDIITGKGNGKKSIYILNQSPTGLLEHKAVNLHSEKLKEK

SEQ ID NO: 989 - protein, 1381 aa, synthetic construct
  REGION 1..1381: note = MG46-93 effector
MKEIKKIFIGLDMGTNSVGWAATDENYEVIKKNGKALWGIRLFDEAQTAEDRRMHRIARRRIERRSRRIDLLQELFAQEICKKDPGFYERLNESGLYEEDKRVHQTNSLFNDVDFNDKAYYKKYPTIYHLRHALMIEHHPFDVRLVYLAIHHILKHRGHFLFENFQTDEKGTSGFDESFAAFGSALDRIKGSSPDVRKADSMKDILKDKKLGVKEKAASLLQCLGQGKEKDFKAMMTLAAGGTASLSDIFNDEKLKDFEKNKVNFSSAQFEENEPDIMAELGDRYDLIAALHGLYNWSLLAELMGEHHYISEAKIAVYDKHKADLKVLKRVLKQSPKAYAEIFREPGSSANKNYSAYVGVCKVKGKKAAIEKCSYEDFTKTLKSCLKDMPDNNDKDYISRELNMGTFLPKSVSKENGVIPYQLHLQELKIILSKAEAYLPFLKVRDQYGTVSDKIINLFTFRIPYYVGPINEHAGSCWVVKKDKQGKVYPWNFTEKIDIEKSAEGFIRNLTNKCTYLIGEDVLPKNSLLYSEFTVLNELNNVRIGETMQKLPLRLKEKVMDNLFSRHKHVSRTKFIKYLVSEGIDKKEAESISGLDGDFKSSLSSLIDMEHILGNDFSREDAEKMIKDITIFGGDKKMLKTRLHREFSYLTSEQLTSLTRLSYDGWGRLSREFLVNLLPAEGDSCEVLVDHTSGEVLNIISAMRQTSYNLMELLGSRFGYGQAIEERNRKEEGQGRITYKDVEDLYISPAVRRPLWQALKIVREIVKITGKEPSKIFIEMARENGEKGKRTISRKARLQALYKKCRDDTRDWAKELEGKSEEDFRSDRLYLYYTQMGRSMYTGKPIDINRLFDRNVYDIDHIYPQSLTGDDSLDNRVLVEKTVNAKKGDTYPLSSALDGCYISGQQIRIQDIQKEMRPFWHMLLEKELISKEKYNRLSRTTTLSDAEKAAFIGRQLVETRQSTKACAELLSKAYPQTRIVYTKAGNASRFRQYGGFIKVRDMNDYHHAKDAYLNIVVGNVFDTRFTANPLHFLKGNHPVYSLNTEALYGHKVSRSGVDAWIPAEKDEKGQVMAGHEGTMGTVRKWMRKNNILFTRMPLEGKGGLFDQNIMKKGKGQVPLKGDSPISNIEKYGGYNKAKAAYFVLTQSKLNENTVYTLETIPLILKSSIQSNKDKEIYIQKQWRKNGKKMEHPIVCLGHIPVQSLLEINGFKVHLSGKNGKDFLLRNAEQLCINEADAAVLKKILKFNQRASLSQKGEEISINSFDNIQEEDLNRLYHVFEDKLTNKIYKVKLGKQAAVLKKGEEMFNRLSPEQKCKLIGEILHLCQCNAKHADLRLIGGAKNAGALTMTTQIYPKDHVYLIEQSVTGFFEKRILLAPFGEK

SEQ ID NO: 990 - protein, 1378 aa, synthetic construct
  REGION 1..1378: note = MG46-94 effector
MKEIKKIFIGLDMGTTSVGWAATDENYEVIKKNGKALWGIRLFDEAQTAEDRRMHRIARRRIERRSRRIDLLQELFAQEICKKDPGFYERLNESGLYEEDKTVHQTNSLFNDVDFNDKAYYKKYPTIYHLRHALMTENHPFDVRLVYLAIHHILKHRGHFLFENFQTDEKGTSGFDESFAAFGSALDRIKGSSPDVRKADSMKDILKDKKLGVKEKAASLLQCLGQGKEKDFKAMMTLAVGGTASLSDIFNDEKLKDFEKNKVNFSSARFEENEPDIMAELGDRYDLIAALHGLYNWSLLAELMGEHHYISEAKIAVYDKHKADLKVLKRVLKQSPKAYAEIFREPGSSANKNYSAYVGVCKVKGKKAAIEKCSYEDFTKTLKSCLKDMPDSNDKDYISRELNMGTFLPKSVSKENGVIPYQLHLQELKIILSKAEAYLPFLKVKDQYGTVSDKIISLFTFRIPYYVGPINEHAGSCWVVKKDKQGKVYPWNFTEKIDIEKSAEGFIRNLTNKCTYLIGEDVLPKNSLLYSEFTVLNELNNVRIGETMQKLPLRLKEKVMDNLFSCHKHVSRTKFIKYLVSEGIDKKEAESISGLDGNFKNSLSSLIDMKHILGNDFSREDAEKIIQDITIFGGDKKMLKKRLHREFSYLTPEQLTSLTRLSYDGWGRLSRELLVNLLPAEGDSCEVLVDHTSGEVLNIISAMRQTSYNLMELLGSRFGYGQAIEERNRKEEGQGRITYKDVEDLYISPAVRRPLWQALKIVREIVKITGKEPSKIFIEMARENGEKGRRTISRKARLQALYKKCRDDTRDWAKELEGKSEEDFRSDRLYLYYTQMGRSMYTGKPIDINRLFDRNVYDIDHIYPQSLTGDDSLDNRVLVEKTVNAKKGDTYPLSSALDGCYISGQQIRIQDIQKEMRPFWHMLLEKELISKEKYNRLSRTIPLSDAEKAAFIGRQLVETRQSTKACAELLSKAYPQTRIVYTKAGNASRFRQYGGFIKVRDMNDYHHAKDAYLNIVVGNVFDTRFTANPLHFLKGNHPVYSLNTEALYGHKVSRNGVDAWIPAEKDEKGQVIDGHEGTMGTVRKWMRKNNILFTRMPLEGKGGLFDQNIMKKGNGQVPLKGDSPISDIEKYGGYNKASIAYMMLVQAEEKGKPVYLLESIPNYVKNKLTSDKERQEYCVRTWTAQGNKYRHPQILIPKVRIQSLFEIDGFKAHISGKTDDRFVMRNAQELCMDNALAGVLKNILKFIHRKTVQKDAVITEYDGVSDDNTLALYDFFVDKLSSSIYGKKFATQADFLRQSKDKFMNLPLEERCEVLGSILHLFQCNAVLSDFHLLGGSRQAGRIYLNKKIKAQDHVYLIEQSVTGFFEKRILLAPFGEK

SEQ ID NO: 991 - protein, 1358 aa, synthetic construct
  REGION 1..1358: note = MG46-95 effector
MKNEKRTYPDYFIGIDAGTDSVGWAVTDEQYNILKFGKKAMWGIRLFDEANPAAERRMYRTQRRRYGRRAQRTKLLQELFAEEITKKDPGFFLRMKESKYLPEDRKYDFKYLLFNDDNYTDGDFHKEYPTVYHLRKAFLDGKNISDPRLLYLAVHHVIINRGHFLFDGVNVENVTKFETVFNSLVEYINDNFDSESDIKKITDVDTAEFSEILKSKSTVTAKKKALYELFGVKKGQIKAVCDLLAGSSSVNLSDLFDNETLNSSEKNKITFSSSSYQDEHDSYEEILDGDIIFTDLLKSVYDWSILADILGDNSYISQSKVKSYDKHRADLKLLKKVVNKHCRDKYYDLFKSDKNDKNYCAYSGMCKIGGKKKEIKRAKLDDFYAEIKKILKPFDDDDDVKIIFSDIETKSFLPKQISTENCALPYQLNEFELKRILSNAGNNFSFLKEKDESGITVSDKIMKLLTFRIPYYVGPLNDEHKGKNSNCWMVRRDNSKDRITPWNFENKVDIEQSAQEFIFRMTNKCTYLYGEDVLPKNSLLYSEYEVLNELNNLSLNGERLNVEDKKDIIEKVFKQKNKVKIKDIVNYYRSVGKEVSADDFSGLADMKEFKSSLKSYRDFDKILGDRFNCNYAEEAILAVLLFSGDKKILTSRLKKIGGGYFTDDEIKKISSLRYSDWGRFSKKLLTGVYSAYSQTGEYMNIITAMRETTCNFMETQGQNFGFKDEIQKINSEVMPKINEFSYDALVKDLYVSPKIKRSVWQTLLIVREIVKITGHEPKKIFIEMARGTDGTSKTPDSRKNRLSELYKKCGEDSGVLYDSLAKHTDSDLRKTALYLYYTQMGKCMYSGEDIELDDLFDKNIYDIDHIYPQSKTKDDSLDNKVLVKKKLNLDKSDKFPIPSHIITDKARENWIACKNAGLISKEKYERLTRKTELTADELAGFINRQLVETRQSTKAVAEILTEMFPDTAIVYSKASNADVFKKYFDIPKVREVNDYHHARDAYINIVVGNVFDVKFTRNAVRFIKSGKQYSLNECMYDFPVGNKDNPAWIPGDDGTISTVKKVCSRENILYTRMPYTQCGTLYDVQLLKKGKGQFPAKPGDCHFDGQTNEEIINKYGGYNKIKGAYFCLVEHTDKKNNRVRSIEYVPVYLADSIEKNPSLLEKYVSETLGLKDADVRIRRIKMDSLFSYNGFLMNLSGRTGSRLIFKPAVQLRLNMGYYKYLKNIVKFHDRQRIMKNTLTVSDFDDISKEKNLELYDVLLSKIKDGVYGIVYSTSLKLLTEKREKFISLSVELQVELLYNELHLFQCNRVNSDLSLLGGSPNSGIILIQKTVTDKNKEYLINQSPTSLFESAPVDLYTI

SEQ ID NO: 992 - protein, 1366 aa, synthetic construct
  REGION 1..1366: note = MG46-96 effector
MRWMSIMKEINEYYLGLDMGEGSLGWAVTTPDYHVVKKAGKALWGVRLFELAKTAKERRVFRTGRRRIERRNQRIDFLQELFSEAVCEKDPGFYQRLNDSRLWEEDKTERQINSLFNDVDFTDKSYHKKFPTIYHLRQKLMDDSCEFDVRLVYLAIHHILKHRGHFLLENFEIREDGAVGFEEAMADLGNVLGQFLDRSLPVENNDACKEILKNRKLNKLEKLEQLGKLYDAGGDKSIKEIFRLIVGGTAHLAVIFCDETLKNTERGKISFEDAQYEEYKNDVQTILDDRFDVVAACETLHNWAILAELMGNYKYISDAKVAIFNEHRKDLTVLKRLLKRDSNVYTKMFRMAGKNSYSAYVGLCKIHGKKVPIEKACTQGDFAGEIKKIIKNFPDSEDKKYILDKIERNELLPKAVSKQNGVIPYQLHLVELNKILSNAERYLPFLKKEDEYGTVSDKIRKLFTFRIPYYVGPLNEHSPFAWAVRKDENGHIYPWNFERKIDIEASAEEFIRRMTNKCTYLVKKDVLPKNSLLYTEFMVLNELNNVRIGSAQEKLPPGMKARVWERLFLKDKKITAKKMCSYLIREEHISKEEAAQISGIERDFKASLAPWIDMRKILGDNFTVSDSEKIIKDITLFGADKKMLRRRLKARFGYLEDCQVKELVRLPYQGWGRLSKEFLTQILPKAERDSTVLVDQETGEVMNIITALKKTDHNLMELLSGKFGYSAALSEVNTTSVSVCDKAISYKNIQDMRISPAVKRPLWQTLRVIKEIIHIMGKAPSRIFIEMARAEDEKKWKTVSRKDRLLDLYKKCKDEIRHWSADIKKLGEEIKELSDGQLRSDKLYLYYTQMGRSMYTGKPICLGSLMAGADYDIDHIYPRSATGDDSLDNRVLVERTENAKKGDHYPLSIEIQGGRAVFWKVLLDKGFISKEKYRRLTRKTLLTDDEKAGFIGRQLVETRQSTKAIAEILKKAFPETKIIYTKARNVSRFRQYAEFVKVRDMNDYHHAKDAYLNIVVGNAFYTKFTSNPIHFLSEKNAVYSLNERTFYQFPIQRGSTMAWEPGDSGTMAVVRKWMDKNNILYTRMPFEEKGGLFDQNILKKGKRQVSLRARGALSDIQKYGGYNNATASYFMLVKAEKNGKTIYLLETVPLHLSGRLESIEDKINFCRELWHRDRKDYKNPVICIPKIYKQSLFEVDGFREHISAKTGNQFVMRNAEQLCLNAESAQIIKNVLKFNQRKQVQKELKITVHDKITEENLINIFETFISKIQTSIYRNKFEASVGLMIKGKGTFIELSMEDKCKCIGEILHLFQCNPVLSDLQLIGGKKASGRIYMGKRFDGNKKVFLVLQSVTGFFEKKILLAPYEKK

SEQ ID NO: 993 - protein, 1360 aa, synthetic construct
  REGION 1..1360: note = MG46-97 effector
MKEINEYYLGLDMGEGSLGWAVTTPDYHVVKKAGKALWGVRLFELAKTAKERRVFRTGRRRIERRNQRIDFLQELFSEAVCEKDLGFYQRLNDSRLWEEDKTERQINSLFNDVDFTDKSYHKKFPTIYHLRQKLMDDSCEFDVRLVYLAIHHILKHRGHFLLENFEIREDGAVGFEEAMADLGNVLGQFLDRSLPVENNDACKEILKNRKLNKLEKLEQLGKLYDAGGDKSIKEIFRLIVGGTAHLAVIFCDETLKNTERGKISFEDAQYEEYKNDVQTILDDRFDVVAACETLHNWAILAELMGNYKYISDAKVAIFNEHRKDLTVLKRLLKRDSNVYTKMFRMAGKNSYSAYVGLCKIHGKKVPIEKACTQGDFAGEIKKIIKNFPDSEDKKYILDKIERNELLPKAVSKQNGVIPYQLHLVELNKILSNAERYLPFLKKEDEYGTVSDKIRKLFTFRIPYYVGPLNGHSPFAWAVRKDGNGHIYPWNFERKIDIEASAEEFIRRMTNKCTYFVKKDVLPKNSLLYTEFMVLNELNNVRIGSAQEKLPPGMKARVWERLFLKDKKITAKKMCSYLIREEHISKEEAAQISGIERDFKASLAPWIDMRKILGDNFTVSDSEKIIKDITLFGADKKMLRRRLKARFGYLEDCQVKELVRLPYQGWGRLSKEFLTQILPKAERDSTVLVDQETGEVMNIITALKKTDHNLMELLSGKFGYSAALSEVNTTSVSVCDKAISYKNIQDMRISPAVKRPLWQTLRVIKEIIHIMGKAPSRIFIEMARAEDEKKWKTVSRKDRLLDLYKKCKDEIRNWSADIKKLGEEIKELSDGQLRSDKLYLYYTQMGRSMYTGKPICLGSLMAGADYDIDHIYPRSATGDDSLDNRVLVERTENAKKGDHYPLSIEIQGGRAVFWKVLLDKGFISKEKYRRLTRKTLLTDDEKAGFIGRQLVETRQSTKAIAEILKKAFPETKIIYTKARNVSRFRQYAEFVKVRDMNDYHHAKDAYLNIVVGNAFYTKFTSNPIHFLSEKNAVYSLNERTFYQFPIQRGSTMAWEPGDSGTMAVVRKWMDKNNILYTRMPFEEKGGLFDQNILKKGKGQVSLRARGALSDIQKYGGYNNATASYFMLVKAEKNGKTIYLLETVPLHLSGRLESIEDKINFCRELWHRDRKDYKNPVICIPKIYKQSLFEVDGFREHISAKTGNQFVMRNAEQLCLNAESAQIIKNVLKFNQRKQVQKELKITVHDKITEENLINIFETFISKIQTSIYRNKFEASVGLMIKGKGTFIELSMEDKCKCIGEILHLFQCNPVLSDLQLIGGKKASGRIYMGKRFDGNKKVFLVLQSVTGFFEKKILLAPYEKK

SEQ ID NO: 994 - protein, 1350 aa, synthetic construct
  REGION 1..1350: note = MG46-98 effector
METKKKSFGEYFLGIDAGTDSVGWAVTDENYNVLKFHGKAMWGVRLFEEANPAADQRAARTARRRQGRKVQRTKLLQELFAPEISKIDPAFFIRMSDSKYHAEDKTEFQPNALFNDAGYTDKDFHKEYPTVYHLRRAFIEGKDIRDPRLLYLAVHHIINNRGHFLFEGMDLSKVTDFETPFAKLCEYLREEEYDFDLSGTDTEKLKESLKAKKGITQKKKDLYAVLGNSKGTLKSVCDLLAGSAGIKLSDLFEDKSLEEETPSKISLSDSSIEENRTALENILQDRIQLIDCLKAVYDWAVLDEILSGSPYISFAKTESYEKHKRDLALLKRTVKRLCPEKYNEMFKSPDKENNYCAYSGMCIIRGKKTEIKKRASADDFRKYTEKLLKDKDDPDVKIILKEIEAQTFMPKQRCGENSVLPYQVHKVELEKILENSEKNFPFLMSEDENGLTVKDKILKILTFRIPYYVGPLNDAHKEAGFCWIVRKNADDKEAIRPWNFEQKVDLQASAEQFINRMTNKCTYLVGEDVLPKESILYSEYSVLNELNNLRLNGEPLAAEDKTAIVDGLFRRNNKVKIKDIANYYKRTGREVKIDDFTGFHEDLKSSMRSYNAFSTIMGDRFDRDAAEEAIRAIVLFGNDQKILLQRLKGIKGGYFTEAERKQIARLKFSDWGRLSEKFLTGIYSADKETGEAFNIIEALRRTDKNLMQLLSSDYDFKKTIDAENEKINGGIPEFSYDALVKDSYASPAVKRAIWQVLTIAKEIEKITGHAPKKIFMETTREEREKKATQSRKKQLLELYKKCKDETSEYLRNSLESKEDSELRSTALYLYYTQMGKCMYSGETIELEKLFDKNVYDIDHIYPQSKTKDDSLDNKVLVKKELNGKKSDRFPIPNEVLAPGIREHWKRLRAANLISEEKYNRLTRKTFFSATELSGFIARQLVETSQSTKAAAEILQRVYPETRLVYSRASNVDKFKKRYEIVKVREVNDYHHARDAYLNIVVGNIFDVKFTTNPANFIRSGETYSLNENMYDCDVRRGNTTAWIAGNNGTLTTVKRTCSKENILFTRYAFEQKGGLFDQQIMKKGKGQLPTKPSDPHMQGQSFSAWIDKYGGYNKISGAYFCLVEHTKKGKSVRTLEFVPVYLAAEIEKCPERLEEYLTEDRGIEDPDVRIRKIKFDSLFNFNGFPMHLSGRTGERLLFKPAVQLKVPKGLYTYTKRIVKFTEREKTLRKEIVPRPADGIDKENNLALFDFLSEKLSKTLYNIAYKTQAQLTSGRKETFSNLTEREQVKTLYELLHLFQCNSMLSDLSLIGGPTHTGTLLKSKEITDNDKAEIIYQSPTGLFEHSVDLLTV

SEQ ID NO: 995 - protein, 1330 aa, synthetic construct
  REGION 1..1330: note = MG46-99 effector
MERCGKNAAYLGLDIGSTSVGWAVSDETYRLCRVKGKDMWGVRLFEEAQTAAARRVARVQRRRYDRRNQRLALLQELFQAQIARVDPAFFQRMDAARLWSQDKPWKYTLFEQKGWTDREYHAQYPTVYHLRRALMTQDGPFDVRLVYLALHHILKKRGHFLYADLGDGQLPELEEIIRELELRFEDELGMELRCHDIDTLRPLLMDSTLSISARQKQLNAVFAAETKQQKTWVKALTGAKVKLSELYEDPTLEEAEQKEAEFRKAGYEDGLPVLEAVLGDRFALLEAWRSLYNWGVLQRLLGGASSISEAKVRQYEQNKKDLAELKAVLRADRTLYNRVFRATDVPGNYASIVGHAWVEGKKQTVKVCGHEDFCKFIEKVLDTLEQDERVQALRTRAKEGTLLPKLISGDNSVIPYQLHRAEMEQILDRAAVYLPFLKEKDVEGLTPADKIRALLVFRIPYYVGPLNPHSPNSWFVRKTEGPIYPWNFEDRVDRVRSAQAFIDRMTSSCTYLRGCDVLPACSPIYERFTVLNELNPMTVKGEPLSIELKQAIFEQVFLKIRKPGIRNIVGFLRAQGYDVSREDLGGIDVQGGVKSSLRTTLALQEILGEKYDDAKAEEIVLAATYFGDDRRLLREKLRSLGLTDDVIGRLLRLHCAGWGRLSRELLCEVTSFVPGQPDGASILDTLWQTNETLMGLLSDRYTFAEAIEARNREVGEESLYDFIDELYVSPSVKRQIRQTVLVARELRKVIGHDPKKIFIEMARGKEKKPERKPKRKQTLLACYETFQNEAGALYETLMQTDNQRLRQDKIYLYYTQMGRCMYSGERIDLEELLRSESLYDIDHIYPRSRVKDDSIDNRVLVKRTLNEKKGNDYPLSHEIVEGQRAFWSMLLYRKLISREKYERLTRRTGFTDEELTSFAARQLVETRQGTKAVAQLLGRMMPDSEIVYVKAGLVSDFRHARSLPKVRELNDLHHAKDAYLNIVVGNIYNTQFTHSPMRYICEHRDNYTVNLDSLLKMEIHRGGVLAWDPADGGSIATVRRTMARNSPLVTMMPVIYSGILFDLQPKPQGQGQMPLKKGLPIEKYGGYNKVTGACFMLVEHTLRRRRVRSLIDVPLHLYPDAVSHPELALRHCIEMRDLKEPRIILPIIRMRALLSLDGYKMYITGRTNGNLCIQNANQLMVSEEWEQYIKKIVKAARESMEYERLRGGEGYRPNPRDGLCPEKNLALYDLFVQKMERMPYCQRMSGQRDKLLQARAAFEALDVAQQCCILCQLLNLFSRVGGEADLTGIGLVKNFGILHPSGMISGCAQALLIHQSPTGLYERVVDLNRL

SEQ ID NO: 996 - protein, 873 aa, synthetic construct
  REGION 1..873: note = MG46-100 effector
MNKDLKSIDYYIGLDCGTSSVGFAVTDTNYNILKFNGKRMWGSHLFEEANTAAGRRGFRTARRRLERRRKRILLLQEIFAEEICKVDPTFFIRLNDSKYILEDKTTPDLNILFNDKNYKDKDFFKIYPTAYHLRKALMTEDIKDPRLLYLGIQHILKNRGHFLFPGEGMKAVESIKPLVDDIQNVFEELFDDATFEYTSIGKLQEALMSKRNSEKKEKLEKEILISDTKLKASVVRILLGYKVKTTTLFKKEGDEIPDVEFKKASFEESDLPELQDRLSDEEFAFIKAAKGIYDWTLLASIMSGHLYISDAKIELFDSNKADLKHLKEAIKTYAPDKYESFFHSDEKGSYSSYTGKIHGDHVVKRVKRTGTDEFYKKIKNLLEKVPKDDEHVKHILDAIENDSFMPLLKSFRNGTIPYQMNKIELDAILANCSKNFEFLEKKDPDGFSATEKIKELLKFRVPYYVGPLGSNPYGKETKGKNSWVERKTSGRVLPWNIEQKIDYESSAEKFIERMTNKCTYCKDQDVLPKNSLEYSKYMVLNELNNLRICGDRLSVPRKQEIFNELFKKEKKVSISKLTKYINDNCWYSGKIKKEDITGIDGDLKASLSSYFDFKDFLESHRLKADDVDRIIKWATVFSEGGDMLRKRIEREFGEVLTKEEIDKTSKLKYAGWGRFSHKFLYEIQAINKENGELMSVMRMLWETQNNLMELLSNKYEFIEQITKPKTIGKLDYSIVDEMYVSPAVKKETWQTLRIVDELIRIMGHNPQKVFVEVTRSEQEKKRTVSRKQTLIDTLKDATKTDSNYINELRELISKLEEKSESEVSRQDKLYLYFSQCGKCMYTGERIDIEDLYNTKHNMTLTTYSHNQEQTMTL

SEQ ID NO: 997 - protein, 1378 aa, synthetic construct
  REGION 1..1378: note = MG46-101 effector
MKEIKKIFIGLDMGTNSVGWTATDENYEVIKKNGKALWGIRLFDEAQTAEDRRMHRIARRRIERRSRRIDLLQELFAQEICKKDPGFYERLNESGLHEEDKRVHQTNSLFNDVDFNDKAYYKKYPTIYHLRHALMTENHPFDVRLVYLAIHHILKHRGHFLFENFQTDEKGTSGFDESFAAFGSALDRIKGSSPDVRKADSMKDILKDKKLGVKEKAASLLQCLGQGKEKDFKAMMTLAVGGTASLSDIFNDEKLKDFEKNKVNFSSAQFEENEPDIMAELGDRYDLIAALHGLYNWSLLAELMGEHHYISEAKIAVYDKHKADLKVLKRVLKQSPKAYAEIFREPGSSANKNYSAYVGVCKVKGKKAAIEKCSYEDFTKTLKSCLKDMPDSNDKDYISRELNMGTFLPKSVSKENGVIPYQLHLQELKIILSKAEAYLPFLKVRDQYGTVSDKIISLFTFRIPYYVGPINEHANSCWVVKKDKQGKVYPWNFTEKINVEKSAEGFIRNLTNKCTYLIGEDVLPKNSLLYSEFTVLNELNNVRIGETMQKLPLRLKEKVMDNLFSRHKHVSRTKFIKYLVSEGIDKKEAESISGLDGDFKSSLSSLIDMKHILGNDFSREDAEKMIKDITIFGGDKKMLKNRLHREFSYLTPEQLTSLTRLSYDGWGRLSREFLVNLLPAEGDSCEVLVDHTSGEVLNIISAMRQTSYNLMELLGSRFGYGQAIEERNRKEEGQGRITYKDVEDLYISPAVRRPLWQALKIVREIVKITGKEPSKIFIEMARENGEKGRRTISRKARLQALYKKCRDDTRDWAKELEGKSEEDFRSDRLYLYYTQMGRSMYTGKPIDINRLFDRNVYDIDHIYPQSLTGDDSLDNRVLVEKTVNAKKGDTYPLSSALDGCYISGQQIRIQDIQKEMRPFWHMLLEKELISKEKYNRLSRTTSLSDAEKAAFIGRQLVETRQSTKACAELLSKAYPQTRIVYTKAGNASRFRQYGGFIKVRDMNDYHHAKDAYLNIVVGNVFDTRFTANPLHFLKGNHPAYSLNTEALYGHKVSRSGVDAWIPAEKDKKGQVMAGHEGTMGTVRKWMRKNNILFTRMPLEGKGGLFDQNIMKKGKGQVPLKGDSPVSDIGKYGGYNKASIAYMMLVQAEEKGKPVYLLESIPNYVKNKLISDKERQAYCVRTWTAQGNKYRNPQILIPKIRIQSLFEIDGFKVHISGKTGNLFVMRNAQELCMDNALAGVLKNVLKFIHRKTVQKDAAITEYDGVSDDNTLALYDFFVDKLSSSIYGKKFATQADFLRQSKDKFMNLPLEERCEVLGSILHLFQCNAVLSDFHLLGGSRQAGRIYLNKKIKVQDHVYLIEQSVTGFFEKRILLAPFGEK

SEQ ID NO: 998 - protein, 839 aa, synthetic construct
  REGION 1..839: note = MG46-102 effector
MDRVSSAQAFIDRMTSSCTYLCGCDVLPACSPIYERFTVLNELNPMTVKGEPLSIELKQALYEQVFLKIRKPGIRNIVGFLRAQGCDVSREDLGGIDVQGGVKSSLRTTLALREILGEKYDDAQAEEIVLAATYFGDDRRLLREKLRSLGLTDDVIGRLLRLHCAGWGRLSRELLCEVTSFAPGQPDGVSILEALWQTNETLMGLLSDCYAFAEAIEERNREVGEESLYDFIDELYVSPSVKRQIRQTVLVARELRKVIGHDPKKIFIEMARGKEKKPERKPERKQTLLACYETFWDEAGALYETLMQTDNQRLRQDKIYLYYTQMGRCMCSGERIDLEELLRSESLYDIDHIYPRSRVKDDSIDNRVLVKRTLNEKKGNDYPLSHEIVEGQRAFWSMLLYRKLISRVKYERLTRRTGFTDEELTSFAARQLVETRQGTKAVAQLLGRMMPDSEIVYVKAGLVSDFRHARSLPKVRELNDLHHAKDAYLNIVVGNIYNTQFTHSPMRYICEHRDNYTVNLDSLLKMEIHRGGVLAWDPADGGSIATVRRTMARNSPLVTMMPVIYSGILFDLQPKPQGQGQMPLKKGLPIEKYGRYNKVTGACFMLVKHTLRRRRVRSLIDVPLHLYPDAVSHPELALRHCIEMRDLKEPRIILPIIRMRALLSLDGYKMYITGRTNDNLCIQNANQLMVSEEWEQYIKKIVKAARESMEYERLRGGDGYRPNPRDGLCPEKNLALYDLFVQKMERMPYCQRMSGQRDKLLQARAAFEALDVAQQCCILCQLLNLFSRSGERVDLTSIGLVKNFGVLYPSGTISGCKRALLIHQSPTGLYERVIDLNRL

SEQ ID NO: 999 - protein, 1382 aa, synthetic construct
  REGION 1..1382: note = MG46-103 effector
MKEIRNYFIGLDMGTTSVGWAATDENYEIIKKNGKALWGIRLFDEAQTAADRRMHRIARRRIDRRSRRIDLLQELFAQEICKKDPGFYERLNESGLYEEDKTVHQKNSLFNDVDFDDKAYYKEYPTIYHLRYDLMTKDRPFDVRLVYLAVHHILKHRGHFLFDHFQVDENGVSGFEESFAAFGDAFAHIKGESFDMGKEEEMKALCRDKKLGVRHKALALAQCLGRSKDKDFKAMMTLAAGGTALLSEVFKDEGLKDFSKNKVSFSDSQFENDKPEIIAELGDRYDLIAALHGLYNWSFLAELMRGHKYISEAKIEIYDKHKEDLALLKKVLKQDRSVYNLMFKEPGDKKPINYSAYVKACKTNGKKLPLPYGKFKYEEFIKTVKFCLKNLPDSPDKKNIENKLEEGSFLLKAVSVENGAIPYQLHLQELKIILSKAEAYLPFLKVRDQYGTVSDKIISLFTFRIPYYVGPINEHAGSCWVVKKDKQGKVYPWNFTEKIDIEKSAEGFIRNLTNKCTYLIGEDVLPKNSLLYSEFTVLNELNNVRIGETMQKLPIRLKEKVMDNLFRRHKHVSRTKFIKYLVSEGIDKKEAESISGLDRDFKSSMSSLIDLTNILGNDFSREDGEQMIKDITIFGGDRKMLKSRLHREFPYLTPEQLTRLIHLSYQGWGRLSKELLVNLLPAEKSAGEVLVDKGSGEVLNIISAMEQTSYNLMELLSSRFGYAKAIEERNREKEGNGTISYQDVEDMYISPAVKRPLWQALKIVREIVKILGKEPSKIFIEMARENGEKGKRTISRKARLQELYKKCRDDSRDWAKELEGKSEEDFRSDRLYLYYTQMGRSMYTGKPIDINQLFDRNVYDIDHIYPQSLTGDDSLDNRVLVEKTVNAKKGDTYPLGSALDGCHIGGQIHIQDIQKEMRPFWRMLLEKGLISKEKYNRLLRTTPLSDTEKAAFIGRQLVETRQSTKACAELLSKAYPETRIVYTKAGNASRFRQYGGFIKVRDMNDYHHAKDAYLNIVVGNVFDTRFTSNPLHFLKGNHPVYSLNTEALYGHKVSRGGVDAWIPAEKDDEGHIMAGHEGTMGTVRKWMRKNNILFTRMPLEGKGGLFDQTIMKKGKGQVPLKGDSPVSDIEKYGGYNKASSAYFVLTSSKLKDETIYTIETIPLIIKRMIQTNKDKEDYIKRHWKDHGKKMVNPHICYGHIPVQSLLEINGFKVHLTGKSGKDFKLRNAEQLCISNDDAAVLKRVLKYNERSSSSKGKEALLITPFDNIQEVDLNRLYQVFEDKLTNQVYKVKLGKQASVLKKGEDKFNELPLEVKCRVIGEILHLFQCNAAIADLRLIGGAKNAGALTMNPRVSPEDHVYLIEQSVTGFFEKRILLAPYGEK

SEQ ID NO: 1000 - protein, 1393 aa, synthetic construct
  REGION 1..1393: note = MG46-104 effector
MMKEIKNYFIGLDMGTTSVGWAATDENYEIIKKNGKALWGIRLFDEAQTAEDRRMHRIARRRIERRSRRIDLLQELFAQEICKKDPGFYERLNQSGLHEEDKKVHQPNSLFNDVDFNDKAYHKKYPTIYHLRHALMTENHPFDVRLVYLAIHHILKHRGHFLFENFQVDENGVSGFEESFAAFGNALEHIKGESLDMGKEEEMKALCKDKKLGVKHKALALAQCLGRSKDNDFKDMMSLAAGGQATLSKIFKDEGLKDFSKNKVSFSDSQFENDKPEIIAKLGDRYDLIAALHDLYNWSFLAELMRGHKYISEAKIAIYDKHKEDLALLKKVLKQDRSAYNRMFKEPKDEEPKGKKTKEKTTNYSDYVKACKTNGKKLPFPYKKFNHEEFIKTVKSCLKNIPDSPDKKNIENKLEEGTFLPKAVSVENGAIPYQLHLQELKIILSKAEAYLPFLKVRDQYGTVSDKIISLFTFRIPYYVGPINEHAGSCWVVKKDKHGKVYPWNFTEKIDIEKSAEGFIRNLTNKCTYLIGEDVLPKNSLLYSEFTVLNELNNVRIGETMQKLPLSLKEKVMDHLFSCYKHVSRTKFIKYLVSEGIDKKEAESISGLDGDFKNSLSSLIDMKHILGNDFSREDAEKIIKDITIFGGDKKMLKNRLQREFSYLTPEQLTSLTQLSYDGWGRLSKEFLVNLLPAEGNSCEVLVDHTSGEVLNIISAMRQTSYNLMELLGSRFGYGQAIEERNRKEEGQGRITYKDVEDLYISPAVRRPLWQALKIVREIVKITGKEPSKIFIEMARENGEKGKRTISRKARLQALYKKCKDDTRDWTKELKGKPEEDFRSDRLYLYYTQMGRSMYTGKPIDINRLFDRNVYDIDHIYPQSLTGDDSLDNRVLVEKTVNAKKGDTYPLSSALDGCYISGQQIRIQDIQKEMRPFWHMLLEKELISKEKYNRLTRTIPLSDAEKAAFIGRQLVETRQSTKACAELLSKAYPQTRIVYTKAGNASRFRQYGGFIKVRDMNDYHHAKDAYLNIVVGNVFSTRFTANPLNFLKGNHQAYSLNTEALYGHKVSRNGVDAWIPAEKDEKGQVMAGHEGTMGTVRKWMRKNNILFTRMPYEGKGGLFDQNIMKKEKGQVPIKGDSPISNIKKYGGYNKAKVAYFVLTQSKLNKKTVYTLEAIPLILKNSIQSNKDKETYIQKQWRKNGKKMEHPIVCLGHIPVQSLLEINGFKVHLSGKNGKDILLRNAEQLCINEADTAVLKKILKFNQRAAMSKKGEEIFINSFDNIQEEDLNRLYHVFEDKLTNQIYKVKLGKQAAVLKKGEETFNRLSPEQKCKLIGEILHLCQCKATHADLRLIGGAKKAGILTMGTQIYPKDHVYLIEQSVTGFFEKRILLAPFGEK

SEQ ID NO: 1001 - protein, 1345 aa, synthetic construct
  REGION 1..1345: note = MG46-105 effector
MKNEKKSFGEYYLGIDAGTDSVGWAVTDGNYNVLKFHGKAMWGVRLFEEAQTAADRRAFRTARRRQGRKVQRTKLLQELFAEEICKKDSAFFIRMADSKYYAEDKTEPQQNALFNDVDYTDKDYHKEYPTVYHLRRAFIEGKDIRDPRLLYLAVHHIINNRGHFLFEGMDLSKVVDFETPFSVLKEYLREEDFGFDFSNIDADALKESLKTKQGITQKKKDLYKLLGKEKGTLKSVCDLLAGGSGIKLTDLFNDESLAGETPEKISLADSSIEDDRTALENILQDRIQLLDCLKAVYDWAILDEILSGSPYISFAKTQSYEKHKKDLALLKKTIKRLCPEKYKEVFKSPNTANNYCAYSGMCVINGKKTAIEKRTTASDFGKYIAKLLSSFDDPDAKDILRQIDAQTFMPKQRTGENSVLPYQVHKVELEKILGNAEMNFPFLLKKDDSNLTVKDKIIKLLTFRIPYYVGPLNDKHRNSGCCWIVRKNTEDTSRILPWEFEQKVDLYASAEQFINRMTNKCTYLVGEDVLPKDSLLYSKYSVLNELNNLKLNGEPLKQEDKENIIKEIYEKKNKVKIKDIANYYKRNGFDVKPDDFTGFHEELKSSLRSYNLFFSLRGEKLDESAVEEAIRAVVLFGNDKKMLSQRLRNIKNGFFSETEINRISGFKFSDWGRLSKKLLTGIKETGETFNIIEALRVTNKNLMQLLSSEFDFKKKIDEENEKINGGIPEFSYDTLVKDSYASPAVKRSIWQVLTIAKEIEKITGHAPKKIFMETTREDREKKATKSRKKQLVELYKKCREETSELLKTLEKREDSELRNNALYLYYTQMGKCMYSGETIELEHLFDKNVYDIDHIYPQSKTKDDSLNNKVLVKKELNGQKSDRYPVPRDVLSPGIENHWKCLRSAGLISEEKYKRLTRRTNFSDTELSGFIARQLVETNQATKAAAEILKRVYPETRLVYSRASNVDVFKKRYDILKVREVNDYHHARDAYLNIVVGNVFDVKFTMNPLNFIKGGGTYSLNENMYDSDIRRGNNVAWVAGNNGTIATVKKTCSKENILFTRYAFEQKGGLFDQQIMKKGKGQLPTKPSDPHMQGQTEQEWIDKYGGYNKLSGAYFCLVEYKDKGKTVRSIESVPLLVSAKIKNDPSELEKYLKQALGTEELSVRIREIKFNTLFNHNGFLMHITGRTGDQLVFKPALQLKVNASDYAYIKKIVRFCEREKESKKAFTVSGFDGIEKDRNIELFDFFTKKLSSDIFMVHHEPTLKSLLANRNIFVDMSVEMQARTIYQILHIFRCNRMLADLTALQGAKSAGIVRMSKRISSKDKTMIINQSPTGLFENSVDLLTV

SEQ ID NO: 1002 - protein, 1360 aa, synthetic construct
  REGION 1..1360: note = MG46-106 effector
MKEINEYYLGLDMGEGSLGWAVTTPDYHVVKKAGKALWGVRLFESAKTAKERRVFRTGRRRIERRNRRIDFLQELFSEAVCEKDPGFYQRLNDSRLWEEDKTERQINSLFNDVDFTDKSYHKKFPTIYHLRQKLMEDSCEFDVRLVYLAIHHILKHRGHFLLENFEIREDGAVGFEEAMADLGNVLGQFLDRSLPVENNDACKEILKNRKLNKLEKLEQLGKLYDAGGDKSIKEIFRLIVGGTAHLAVIFCDETLKNTERGKISFEDAQYEEYKNDVQTILDDRFDVVAACETLHNWAILAELMGNYKYISDAKVAIFNEHRKDLTVLKRLLKRDSNVYTKMFRMAGKNSYSAYVGLCKIHGKKVPIEKACTQGDFAGEIKKIIKNFPDSEDKKYILDKIERNELLPKAVSKQNGVIPYQLHLVELNKILSNAERYLPFLKKEDEYGTVSDKIRKLFTFRIPYYVGPLNGHSPFAWAVRKDENGHIYPWNFERKIDIEASAEEFIRRMTNKCTYLVKKDVLPKNSLLYTEFMVLNELNNVRIGSAQEKLPPGMKARVWERLFLKDKKITAKKMCSYLIREEHISKEEAAQISGIERDFKASLAPWIDMRKILGDNFTVSDSEKIIKDITLFGADKKMLRRRLKARFGYLEDCQVKELVRLPYQGWGRLSKEFLTQILPKAERDSTVLVDQETGEVMNIITALKKTDHNLMELLSGKFGYSAALSEVNTTSVSVCDKAISYKNIQDMRISPAVKRPLWQTLRVIKEIIHIMGKAPSRIFIEMARAEDEKKWKTVSRKDRLLDLYKKCKDEIRNWSADIKKLGEEIKELSDGQLRSDKLYLYYTQMGRSMYTGKPICLGSLMAGADYDIDHIYPRSATGDDSLDNRVLVERTENAKKGDHYPLSIEIQGGRAVFWKVLLDKGFISKEKYRRLTRKTLLTDDEKAGFIGRQLVETRQSTKAIAEILKKAFPETKIIYTKARNVSRFRQYAEFVKVRDMNDYHHAKDAYLNIVVGNAFYTKFTSNPIHFLSERNAVYSLNERTFYQFPIQRGSTMAWEPGDSGTMAVVRKWMDKNNILYTRMPFEEKGGLFDQNILKKGKGQVSLRARGALSDIQKYGGYNNATASYFMLVKAEKNGKTIYLLETVPLHLSGRLESIEDKINFCRELWPRDRKDYKNPVICIPKIYKQSLFEVDGFREHISAKTGNQFVMRNAEQLCLNAESAQIIKNVLKFNQRKQVQKELKVTVHDKITEENLINIFETFISKIQTSIYRNKFEASVGLMIKGKGTFIELSMEDKCKCIGEILHLFQCNPVLSDLQLIGGKKASGRIYMGKRFDGNKKVFLVLQSVTGFFEKKILLAPYEKK

SEQ ID NO: 1003 - protein, 1330 aa, synthetic construct
  REGION 1..1330: note = MG46-107 effector
MERCGKNAAYLGLDIGSTSVGWAVSDETYRLCRVKGKDMWGVRLFEEAQTAAARRVARVPRRRYDRRNQRLALLQELFQAQIARVDPAFFQRMDAARLWSQDKPWKYTLFEQKGWTDREYHAQYPTVYHLRRALMTQDGPFDVRLVYLALHHILKKRGHFLYADLGDGQLPELEEIIRELELRFEDELGMELRCHDIDTLRPLLMGSTLSISARQKQLNTVFAAETKQQKTWVKALTGAKVKLSELYEDPTLEEAEQKEAEFRKAGYEDGLPVLEAVLGDRFALLEAWRSLYNWGVLQRLLGGASSISEAKVRQYEQNKKDLAELKAVLRADRTLYNRVFRATDVSGNYASIVGHAWVEGKKQTVKVCGHEDFCKFIEKVLDTLEQDERVQALRTRAKEGTLLPKLISGDNSVIPYQLHRAEMEQILDRAAVYLPFLKEKDAKGLTPADKIRALLVFRIPYYVGPLNPHSPNSWFVRKTEGPIYPWNFEDRVDRVRSAQAFIDRMTSFCTYLRGCDVLPACSPIYERFTVLNELNPMTVKGEPLSIELKQAIFEQVFLKIRKPGIRNIVGFLRAQGYDVSREDLGGIDVQGGVKSSLRTTLALQEILGEKYDDAKAEEIVLAATYFGDDRRLLREKLRSLGLTDDVIGRLLRLHCAGWGRLSRELLCEVTSFVPGQPDGASILDTLWKTNETLMGLLSDRYMFAEAIEARNREVGEESLYDFIDELYVSPSVKRQIRQTVLVARELRKVIGHDPKKIFIEMARGKEKKPERKPKRKQTLLACYETFQNEAGALYETLMQTDNQRLRQDKIYLYYTQMGRCMYSGERIDLEELLRSESLYDIDHIYPRSRVKDDSIDNRVLVKRTLNEKKGNDYPLSHEIVEGQRAFWSMLLYRKLISREKYERLTRRTGFTDEELTSFAARQLVETRQGTKAVAQLLGRMMPDSEIVYVKAGLVSDFRHARSLPKVRELNDLHHAKDAYLNIVVGNIYNTQFTHSPMRYICEHRDNYTVNLDSLLKMEIHRGGVLAWDPADGGSIATVRRTMARNSPLVTMMPVIYSGILFDLQPKPQGQGQMPLKKGLPIEKYGGYNKVTGACFMLVEHTLRRRRVRSLIDVPLHLYPDAVSHPELALRHCIEMRDLKEPRIILPIIRMRALLSLDGYKMYITGRTNGNLCIQNANQLMVSEEWEQYIKKIVKAARESMEYERLRGGEGYRPNPRDGLCSEKNLALYDLFVQKMERMPYCQRMSGQRDKLLQARAAFEALDVAQQCCILCQLLNLFSRVGGEADLTGIGLVKNFGILHPSGMISGCAQALLIHQSPTGLYERVVDLNRL

SEQ ID NO: 1004 - protein, 1360 aa, synthetic construct
  REGION 1..1360: note = MG46-108 effector
MKEINEYYLGLDMGEGSLGWAVTTPDYHVVKKAGKALWGVRLFELAKTAKERRVFRTGRRRIERRNQRIDFLQELFSEAVCEKDPGFYQRLNDSRLWEEDKTERQINSLFNDVDFTDKSYHKKFPTIYHLRQKLMDDSCEFDVRLVYLAIHHILKHRGHFLLENFEIREDGAVGFEEAMADLGNVLGQFLDRSLPVENNDACKEILKNRKLNKLEKLEQLGKLYDAGGDKSIKEIFRLIVGGTAHLAVIFCDETLKNTERGKISFEDAQYEEYKNDVQTILDDRFDVVAACETLHNWAILAELMGNYKYISDAKVAIFNEHRKDLTVLKRLLKRDSNVYTKMFRMAGKNSYSAYVGLCKIHGKKVPIEKACTQEDFAGEIKKIIKNFPDSEDKKYILDKIERNELLPKAVSKQNGVIPYQLHLVELNKILSNAERYLPFLKKEDEYGTVSDKIRKLFTFRIPYYVGPLNGHSPFAWAVRKDENGHIYPWNFERKIDIEASAEEFIRRMTNKCTYLVKKDVLPKNSLLYTEFMVLNELNNVRIGSAQEKLPPGMKARVWERLFLKDKKITAKKMCSYLIREEHISKEEAAQISGIERDFKASLAPWIDMRKILGDNFTVSDSEKIIKDITLFGADKKMLRRRLKARFGYLEDCQVKELVRLPYQGWGRLSKEFLIQILPKAERDSTVLVDQETGEVMNIITALKKTDHNLMELLSGKFGYSAALSEVNTTSVSVCDKAISYKNIQDMRISPAVKRPLWQTLRVIKEIIHIMGKAPSRIFIEMARAEDEKKWKTVSRKDRLLDLYKKCKDEIRNWSADIKKLGEEIKELSDGQLRSDKLYLYYTQMGRSMYTGKPICLGSLMAGADYDIDHIYPRSATGDDSLDNRVLVERTENAKKGDHYPLSIEIQGGRAVFWKVLLDKGFISKEKYRRLTRKTLLTDDEKAGFIGRQLVETRQSTKAIAEILKKAFPETKIIYTKARNVSRFRQYAEFVKVRDMNDYHHAKDAYLNIVVGNAFYTKFTSNPIHFLSEKNAVYSLNERTFYQFPIQRGSTMAWEPGDSGTMAVVRKWMDKNNILYTRMPFEEKGGLFDQNILKKGKGQVSLRARGALSDIQKYGGYNNATASYFMLVKAEKNGKTIYLLETVPLHLSGRLESIEDKINFCRELWHRDRKDYKNPVICIPKIYKQSLFEVDGFREHISAKTGNQFVMRNAEQLCLNAESAQIIKNVLKFNQRKQVQKELKITVHDKITEENLINIFETFISKIQTSIYRNKFEASVGLMIKGKGTFIELSMEDKCKCIGEILHLFQCNPVLSDLQLIGGKKASGRIYMGKRFDGNKKVFLVLQSVTGFFEKKILLAPYEKK

SEQ ID NO: 1005 - protein, 1392 aa, synthetic construct
  REGION 1..1392: note = MG46-109 effector
MKEIKKIFIGLDMGTTSVGWAVTDENYEIIKKNGKALWGIRLFDEAQTAEDRRMHRIARRRIERRSRRIDLLQELFAQEICKKDPGFYQRLNESGLHEEDKSIRQANSLFNDDDYDDKAYHKKYPTIYHLRHALMTENHPFDVRLVYLAIHHILKHRGHFLFENFQVDENGVSGFEESFAAFGNALEHIKGESLDMGKEEEMKALCKDKKLGVKHKALALAQCLGRSKDNDFKDMMSLAAGGQATLSKIFKDEGLKDFSKNKVSFSDSQFENDKPEIIAKLGDRYDLIAALHDLYNWSFLAELMRGHKYISEAKIEIYDKHKEDLALLKKVLKQDRSAYNRMFKEPKDEEPKGKKTKEKTTNYSDYVKACKTNGKKLPFPYKKFNHEEFIKTVKSCLKNIPDSPDKKNIENKLEEGTFLPKAVSVENGAIPYQLHLQELKIILSKAEAYLPFLKVKDQYGTVSDKIISLFTFRIPYYVGPINEHAGSCWVVKKDKQGKVYPWNFTEKIDIEKSAEGFIRNLTNKCTYLIGEDVLPKNSLLYSEFTVLNELNNVRIGETMQKLPLRLKEKVMDNLFSRHKHVSRTKFIKYLVSEGIDKKEAESISGLDGDFKSSLSSLIDMKHILGNDFSREDAEKMIQDITIFGGDKKMLKNRLHREFSYLTPEQLTSLTRLSYDGWGRLSREFLVHLLPADGDSCEVLVDHTSGEVLNIISAMRQTSYNLMELLGSRFGYGQAIEERNRKEEGQGRITYKDVEDLYISPAVRRPLWQALKIVREIVKITGKEPSKIFIEMARENGEKGRRTISRKARLQALYKKCRDDTRDWAKELEGKSEEDFRSDRLYLYYTQMGRSMYTGKPIDINRLFDRNVYDIDHIYPQSLTGDDSLDNRVLVEKTVNAKKGDTYPLSSALDGCYISGQQIRIQDIQKEMRPFWHMLLEKELISKEKYNRLTRTIPLSDAEKAAFIGRQLVETRQSTKACAELLSKAYPQTRIVYTKAGNASRFRQYGGFIKVRDMNDYHHAKDAYLNIVVGNVFDTRFTANPLHFLKGNHPVYSLNTEALYGHKVSRNGVDAWIPAEKDEKGQVIDGHEGTMGTVRKWMRKNNILFTRMPLEGKGGIFDQNIMKKGKGQVPLKGDSPVSDIGKYGGYNKAKAAYFVLTQSKLNENTVYTLETIPLILRNNIQSNKDKETYIQKQWKKNGTKMEHPLVCLGHIPVQSLLEINGFKAHLSGKNGKTFSLRNAEQLCINEADTAVLKKILKFNQRAVLSKKGEEISINPFDNIQEEDLNRLYHVFEDKLTNQIYKVKLGKQAAVLKKGEETFNRLSPEQKCKLIGEILHLCQCNATNADLRLIGGAKNAGALTMSTQIYPKDHVYLIEQSVTGFFEKRILLAPFGEK

SEQ ID NO: 1006 - protein, 1380 aa, synthetic construct
  REGION 1..1380: note = MG46-110 effector
MKELKNYFVGLDMGTTSVGWAVTDENDEIIKKNGKALWGIRLFEEAETAADRRMHRISRRRIERRSRRIDLLQELFAQEICKKDPGFYERLNESGLYEEDKTVHQPNSLFNDVDFNDKAYHKTYPTIYHLRNALMTENRVFDVRLVYLAIHHILKHRGHFLFDNFQVDENGASGFEESFGAFGNALDRIKGDSLDVSKEDAMKAVCRDKKLGVKQKAAALGQCLGRGKDKAFKAMMTLAAGGTASLSDVFEDDGLKDFDKNKVNFSSIQFEENEPDIMAELGDRYDLIAALQGLYSWSLLAELMGDHKYISEAKIELYEKHGKDLKVLKRVLKQSPIDYAHMFKAQGSKKNTNYSAYVGVCKIKGKKVPVEKCGYEDFAKTVKSCLKNLPDSEDKKYIEKELEQGTFLPKAVSKENGVIPYQLHLQELKKILSSAEAYLPFLKEKDKYGTVSDKIISLFTFRIPYYVGPTNEHAKSCWVVKKDKTGKIYPWNFTEKIDVEKTAEGFIRNLTNKCTYLIGEDVLPKNSLLYTEFMVLNELNNVRIGQTMQKLSPELKEKILENLFRKHKHVARKRFINYLAAEGMDRKEAESISGLDGDFKSSLSSFIDMKGILGKDFKREDVERMITDITIFSGDKKMLRTRLHREFSYLSPKQLTSITRLSYEGWGRLSKELLVNLFPAEGDAYEVLADKTSGEVLNIISAMEQTSFNLMELLSSRFGYAKAIEERNREKEGNGTISYRDVEDMYISPAVKRPLWQALKIVREIVKILGKEPSKIFIEMARENGEKGRRTVSRKARLQELYKKCRDDSRDWAKELEERPEEDFRSDRLYLYYTQMGRSMYTGKPIDINQLFDRNVYDIDHIYPQSLTGDDSLDNRVLVEKTVNAKKGDTYPLGRALDGCHIGGQIHIQDIQKEMRPFWHMLYEKEFISKEKYNRLSRTIPLTDTEKAAFIGRQLVETRQSTKACAELLSKAYPDTRIVYTKAGNASRFRQYGGFIKVRDMNDYHHAKDAYLNIVVGNVFDTRFTSNPIRFLKGNHPVYSLNVEALYGHRVGRGGVDAWIPAEKDEEGHTCPGHEGTMGTVRKWMKKNNILFTRMPFEGKGGFFDQNIMKKGKGQVPLKENSPVSDIEKYGGYNKASSAYFVLTSSKLKNETIYTIETIPLIIKRMIQTNKDKEDYIKQHWKDHGKKMVNPHICYGHIPVQSLLEINGFKVHLTGKSGKDFKLRNAEQLCISNDDAAVLKRVLKYNERSSSSKGKEALLITPFDNIQEVDLNRLYQVFEDKLTNQVYKVKLGKQASVLKKGEGKFNELPLEVKCRVIGEILHLFQCNAAIADLRLIGGAKNAGALTMNPRVSSEDHVYLIEQSVTGFFEKRILLAPYGEK

SEQ ID NO: 1007 - protein, 1360 aa, synthetic construct
  REGION 1..1360: note = MG46-111 effector
MKEINEYYLGLDMGEGSLGWAVTTPDYHVVKKAGKALWGVRLFELAKTAKERRVFRTGRRRIERRNQRIDFLQELFSEAVCEKDPGFYQRLNDSRLWEEDKTERQINSLFNDVDFTDKSYHKKFPTIYHLRQKLMDDSCEFDVRLVYLAIHHILKHRGHFLLENFEIREDGAVGFEEAMADLGNVLGQFLDRSLPVENNDACKEILKNRKLNKLEKLEQLGKLYDAGGDKSIKEIFRLIVGGTAHLAVIFCDETLKNTERGKISFEDAQYEEYKNDVQTILDDRFDVVAACETLHNWAILAELMGNYKYISDAKVAIFNEHRKDLTVLKRLLKRDSNVYTKMFRMAGKNSYSAYVGLCKIHGKKVPIEKACTQGDFAGEIKKIIKNFPDSEDKKYILDKIERNELLPKAVSKQNGVIPYQLHLVELNKILSNAERYLPFLKKEDEYGTVSDKIRKLFTFRIPYYVGPLNGHSPFAWAVRKDENGHIYPWNFERKIDIEASAEKFISRMTNKCTYLVKKDVLPKNSLLYTEFMVLNELNNVRIGSAQEKLPPGMKDRVWENLFLKDKKITAKKLCSYLIREEHIPKEEAAQISGIERDFKASLAPWIDMRKILGNNFIISDSEKIIKDITLFGADKKMLRRRLKARFGYLKDCQVKELVRLPYQGWGRLSKEFLTQILPKAERDTTVLVDQETGEVMNIITALKKTDHNLMELLSGKFGYSAALSEVNTTSVSVCDKAISYKNIQDMRISPAVKRPLWQTLRIIKEIIHIMGKAPSRIFIEMARAEDEKKRKTVSRKDRLLDLYKKCNDEIRHWSEDIKKLGEEIKELSDGQLRSDKLYLYYTQMGRSMYTGKPICLGSLMDGADYDIDHIYPRSATGDDSLDNRVLVEKTENAKKGDHYPLSVEIQRERADFWKILLDKGLISKEKYHRLTRKTLLTDDEKAGFIGRQLVETRQSTKAVAEILKKAFPETKIIYTKARNVSRFRQYAEFVKVRDMNDYHHAKDAYLNIVVGNAFYTKFTSNPVHFLSEKNAVYSLNEKAFYQFPIQRGSTTAWEPGDNGTMAVVRKWMDKNNILYTRMPFEEKGGLFDQNIRKKGKGQVSLKAQGALSDIQKYGGYNKATASYFMLVKAEKNGKRIYLLETVPLHLSERLESIDDKIDFCRELWHKEGKGYKNPVICIPKIYKQSLFEVDGFREHISAKTGDRFVMRNAEQLCLNAESAQIIKNVLKFNQRKQVQKELKVTVHDKITEENLINIFETFISKIQTSIYRNKFKKFVSLMIKEKGTFIELSMEDKCKCIGEILHLFQCNPVLSNLQLIGGEKASGKISMGKKFDGNEKVFLILQSVTGFFEKKILLAPYEKK

SEQ ID NO: 1008 - protein, 1387 aa, synthetic construct
  REGION 1..1387: note = MG46-112 effector
MKEIKKIFIGLDMGTNSVGWTATDENYEVIKKNGKALWGIRLFDEAQTAEDRRMHRIARRRIERRSRRIDLLQELFAQEICKKDPGFYERLNESGLHEEDKSIRQANSLFNDDDYDDKAYHKKYPTIYHLRHALMTENHPFDVRLVYLAIHHILKHRGHFLFENFQTDEKGTSGFDESFAAFGSALERIKGCSPDVRKADSVKDILKDKKLGVTEKAASLLQCLGQGKEKDFKAMMTLAAGGTASLSNIFNDEKLKDFEKNKVNFSSAQFEENEPDIMAELGDRYDLIAALHGLYNWSLLAELMGEHRYISEAKIAVYDKHKADLKVLKRVLKQSPKAYAKIFREPGSNANKNYGAYVGVCKVKGKKEAKEALEKFEKCSYEEFTKTLKPFLKEMPDNNDKDYISRELNMGTFLPKSVSKENGVIPYQLHLQELKIILSKAEAYLPFLKVKDQYGTVSDKIISLFTFRIPYYVGPINEHAGSCWVVKKDKQGKVYPWNFTEKIDIEKSAEGFIRNLTNKCTYLIGEDVLPKNSLLYSEFTVLNELNNVKIGETMQKLPLSLKEKVMDNLFSCYKHVSRTKFIKYLVSEGIDKKEAESISGLDGDFKSSLSSLIDMKHILENDFSREDAEKMIQDITIFGGDKKMLKNRLHRKFSYLTPEQLTSLTRLSYDGWGRLSREFLVNLLPAEGDSCEVLVDHTSGEVLNIISAMRQTSYNLMELLGSSFGYGQAIEERNRKEEGQGRITYKDVEDLYISPAVRRPLWQALKIVREIVKITGKEPSKIFIEMARENGEKGKRTISRKARLQALYKKCRDDTRDWAKELEGKSEEDFRSDRLYLYYTQMGRSMYTGKPIDINRLFDRNVYDIDHIYPQSLTGDDSLDNRVLVEKTVNAKKGDTYPLSSALDGCYISGQQIRIQDIQKEMRPFWHMLLEKELISKEKYNRLTRTIPLSDAEKAAFIGRQLVETRQSTKACAELLSKAYPQTRIVYTKAGNASRFRQYGGFIKVRDMNDYHHAKDAYLNIVVGNVFDTRFTANPLHFLKGNHPVYSLNTEALYGHKVSRSGVDAWIPAEKDEKGQVMAGHEGTMGTVRKWMRKNNILFTRMPLEGKGGLFDQNIMKKGKGQVPLKGDSPISNIEKYGGYNKAKAAYFVLTQSKLNENTVYTLETIPLILKSSIQSNKDKEIYIQKQWKKNGKKMEHPIVCLGHIPVQSLLEINGFKVHLSGKNGKDFLLRNAEQLCINEADAAVLKKILKFNQRASLSKKGEEISINSFDNIQEEDLNRLYHVFEDKLTNKIYKVKLGKQAAVLKKGEEMFNRLSPEQKCKLIGEILHLCQCNAKHADLRLIGGAKNAGALTMTTQIYPKDYAYLIEQSVTGFFEKRILLAPFGEK

SEQ ID NO: 1009 - protein, 1360 aa, synthetic construct
  REGION 1..1360: note = MG46-113 effector
MKEINEYYLGLDMGEGSLGWAVTTPDYHVVKKAGKALWGVRLFESAKTAKERRVFRTGRRRIERRNRRIDFLQELFSEAVCEKDPGFYQRLNDSRLWEEDKTERQINSLFNDVDFTDKSYHKKFPTIYHLRQKLMEDSCEFDVRLVYLAIHHILKHRGHFLLENFEIREDGAVGFEEAMADLGNVLGQFLDRSLPVENNDACKEILKNRKLNKLEKLEQLGKLYDAGGDKSIKEIFRLIVGGTAHLAVIFCDETLKNTERGKISFEDAQYEEYKNDVQTILDDRFDVVAACETLHNWAILAELMGNYKYISDAKVAIFNEHRKDLTVLKRLLKRDSNVYTKMFRMAGKNSYSAYVGLCKIHGKKVPIEKACTQGDFAGEIKKIIKNFPDSEDKKYILDKIERNELLPKAVSKQNGVIPYQLHLVELNKILSNAERYLPFLKKEDEYGTVSDKIRKLFTFRIPYYVGPLNGHSPFAWAVRKDENGHIYPWNFERKIDIEASAEEFIRRMTNKCTYLVKKDVLPKNSLLYTEFMVLNELNNVRIGSAQEKLPPGMKARVWERLFLKDKKITAKKMCSYLIREEHISKEEAAQISGIERDFKASLAPWIDMRKILGDNFTVSDSEKIIKDITLFGADKKMLRRRLKARFGYLEDCQVKELVRLPYQGWGRLSKEFLTQILPKAERDSTVLVDQETGEVMNIITALKKTDHNLMELLSGKFGYSAALSEVNTTSVSVCDKAISYKNIQDMRISPAVKRPLWQTLRVIKEIIHIMGKAPSRIFIEMARAEDEKKWKTVSRKDRLLDLYKKCKDEIRNWSADIKKLGEEIKELSDGQLRSDKLYLYYTQMGRSMYTGKPICLGSLMAGADYDIDHIYPRSATGDDSLDNRVLVERTENAKKGDHYPLSIEIQGGRAVFWKVLLDKGFISKEKYRRLTRKTLLTDDEKAGFIGRQLVETRQSTKAIAEILKKAFPETKIIYTKARNVSRFRQYAEFVKVRDMNDYHHAKDAYLNIVVGNAFYTKFTSNPIHFLSERNAVYSLNERTFYQFPIQRGSTMAWEPGDSGTMAVVRKWMDKNNILYTRMPFEEKGGLFDQNILKKGKGQVSLRARGALSDIQKYGGYNNATASYFMLVKAEKNGKIIYLLETVPLHLSGRLESIEDKINFCRELWHRDRKDYKNPVICIPKIYKQSLFEVDGFREHISAKTGNQFVMRNAEQLCLNAESAQIIKNVLKFNQRKQVQKELKVTVHDKITEENLINIFETFISKIQTSIYRNKFEASVGLMIKGKGTFIELSMEDKCKCIGEILHLFQCNPVLSDLQLIGGKKASGRIYMGKRFDGNKKVFLVLQSVTGFFEKKILLAPYEKK

SEQ ID NO: 1010 - protein, 1349 aa, synthetic construct
  REGION 1..1349: note = MG46-114 effector
MKNEKKSFGEYYLGIDAGTDSVGWAVTDENYNVLKFHGKAMWGVRLFEEAQTAADRRALRTARRRQGRKVQRTKLLQELFAEEICKKDSAFFIRMADSKYYAEDKTEPQQNALFNDVDYTDKDYHKEYPTVYHLRRAFIEGKDIRDPRLLYLAVHHIINNRGHFLFEGMDLSKVVDFETPFSVLKEYLLEEDFGFDFSNIDADALKESLKTKQGITQKKKDLYKLLGKEKGTLKSVCDLLAGGSGIKLTDLFNDESLAGETPEKISLADSSIEDDRTALENILQDRIQLLDCLKAVYDWAILDEILSGSPYISFAKTQSYEKHKKDLALLKKTIKRLCPEKYKEVFKSPNTASNYCAYSGMCVINGKKTAIEKRTTASDFGKYIAKLLSSFDDPDAKDILRQIDAQTFMPKQRTGENSVLPYQVHKVELEKILGNAERNFPFLLKKDDSNLTVKDKIIKLLTFRIPYYVGPLNDKHRNSGFCWIVRKNTEDTSRILPWEFEQKVDLYASAEQFINRMTNKCSYLVGEDVLPKDSLLYSEYSVLNELNNLKLNGESLEQSDKAEIIDELYKKNNKVKIKDIANYYKRKGFEVKPDDFTGFHEELKSSLRSYNMFFNILRDRFDESAVEAAIKAIVLFGNDKKMLLQKLRSIKNGYFTEEEIKRMAGFKFSDWGRLSEKMLTVIYSVNKETGEAFNIIEALRTTDKNLMQLLSAEFDFKKQIYEENEKINGGIPEFSYDALVKDCYASPAVKRSIWQVLTIAKEIEKITGHAPKKIFMETTREDREKKATKSRKKQLVELYKKCREETSELLKTLEKREDSELRNNALYLYYTQMGKCMYSGETIELEHLFDKNVYDIDHIYPQSKTKDDSLNNKVLVKKELNGQKSDRYPVPRDVLSPGIENHWKCLRAAGLISEEKYKRLTRRTNFSDTELSGFIARQLVETNQATKAAAEILKRVYPETRLVYSRASNVDVFKKRYDILKVREVNDYHHARDAYLNIVVGNVFDVKFTMNPLNFIKGGGTYSLNENMYDSDIRRGSNVAWVAGNNGTIATVKKTCSKENILFTRYAFEQKGGLFDQQIMKKGKGQLPTKPSDPHMQGQTEQEWIDKYGGYNKLSGAYFCLVEYKDKGKIVRSIESVPLLVSAKIKNDPSDLEKYLKQALGTEELSVRIREIKFNTLFNHNGFLMHITGRQGNQLIFKPALQLKVNASDYAYIKKIVRFCEREKESKKAFTVSGFDGIEKDRNIELFDFFTKKLSSDIFMVHHAATLKSLLANRSIFVDMSVEMQARTIYQILHIFRCNRMLADLTALQGAKSAGTVLMSKKISLNDKIMIINQSPTGLFENSVDLLTV

SEQ ID NO: 1011 - protein, 1381 aa, synthetic construct
  REGION 1..1381: note = MG46-115 effector
MKEIKKIFIGLDMGTNSVGWTATDENYEVIKKNGKALWGIRLFDEAQTAEDRRMHRIARRRIERRSRRIDLLQELFAQEICKKDPGFYERLNESGLYEEDKRVHQTNSLFNDVDFNDKAYYKKYPTIYHLRHALMTENHPFDVRLVYLAIHHILKHRGHFLFENFQTDEKGTSGFDESFAAFGSALDRIKGSSPDVRKADSMKDILKDKKLGVKEKAASLLQCLGQGKEKDFKAMMTLAAGGTASLSDIFNDEKLKDFEKNKVNFSSAQFEENEPDIMAELGDRYDLIAALHGLYNWSLLAELMGEYHYISEAKIAVYDKHKADLKVLKRVLKQRPDIYAKIFREPGSSANKNYSAYVGVCKVKGKKAAIEKCSYEDFTKTLKSCLKDMPDSNDKDYISRELNMGTFLPKSVSKENGVIPYQLHLQELKIILSKAEAYLPFLKVRDQYGTVSDKIISLFTFRIPYYVGPINEHANSCWVVKKDKQGKVYPWNFTEKIDVEKSAEGFIRNLTNKCTYLIGEDVLPKNSLLYSEFTVLNELNNVRIGETMQKLPLRLKEKVMDNLFSRHKHVSRTKFIKYLVSEGIDKKEAESISGLDGDFKSSLSSLIDMKHILGNDFSREDAEKMIQDITIFGGDKKMLKDRLHREFSYLTPEQLTSLTRLSYDGWGRLSREFLVNLLPAEGDSCEVLVDHTSGEVLNIISAMRQTSYNLMELLGSRFGYGQAIEERNRKEEGQGRITYKDVEDLYISPAVRRPLWQALKIVREIVKITGKEPSKIFIEMARENGEKGKRTISRKARLQALYKKCRDDTRDWAKELEGKSEEDFRSDRLYLYYTQMGRSMYTGKPIDINRLFDRNVYDIDHIYPQSLTGDDSLDNRVLVEKTVNAKKGDTYPLSSALDGCYISGQQIRIQDIQKEMRPFWHMLLEKELISKEKYNRLTRTIPLSDAEKAAFIGRQLVETRQSTKACAELLSKAYPQTRIVYTKAGNASRFRQYGGFIKVRDMNDYHHAKDAYLNIVVGNVFDTRFTANPLHFLKGNHPVYSLNTETLYGHKVSRNGVDAWIPAEKDEKGQVIDGHEGTMGTVRKWMRKNNILFTRMPLEGKGGLFDQNIMKKGKGQVPLKGDSPVSDIGKYGGYNKAKAAYFVLTQSKLNENTVYTLETIPLILRNNIQSNKDKETYIQKQWKKNGTKMEHPLVCLGHIPVQSLLEINGFKAHLSGKNGKTFSLRNAEQLCINEADTAVLKKILKFNQRAVLSKKGEEISINPFDNIQEEDLNRLYHVFEDKLTNQIYKVKLGKQAAVLKKGEETFNRLSPEQKCKLIGEILHLCQCNATNADLRLIGGAKNAGALTMSTQIYPKDHVYLIEQSVTGFFEKRILLAPFGEK

SEQ ID NO: 1012 - protein, 990 aa, synthetic construct
  REGION 1..990: note = MG46-116 effector
MYTRGFCRGNKKIIKNFPDSEDKKYILDKIERNELLPKAVSKQNGVIPYQLHLVELNKILSNAERYLPFLKKEDEYGTVSDKIRKLFTFRIPYYVGPLNGHSSFAWAVRKDENGHIYPWNFERKIDIEASAEEFIRRMTNKCTYLVKKDVLPKNSLLYTEFMVLNELNNVRIGSAQEKLPPGMKVRVWERLFLKDKKITAKKMCSYLIREEHISKEEAAQISGIERDFKASLAPWIDMRKILGDNFTVSDSEKIIKDITLFGADKKMLRRRLKARFGYLEDCQVKELVRLPYQGWGRLSKEFLTQILPKAERDSTVLVDQETGEVMNIITALKKTDHNLMELLSGKFGYSAALSEVNTTSVSVCDKAISYKNIQDMHISPAVKRPLWQTLRVIKEIIHIMGKAPSRIFIEMARAEDEKKWKTVSRKDRLLDLYKKCKDEIRNWSADIKKLGEEIEELSDGQLRSDKLYLYYTQMGRSMYTGKPICLGSLMAGADYDIDHIYPRSATGDDSLDNRVLVERTENAKKGDHYPLSIEIQGGRAVFWKVLLDKGFISKEKYRRLTRKTLLTDDEKAGFIGRQLVETRQSTKAIAEILKKAFPETKIIYTKARNVSRFRQYAEFVKVRDMNDYHHAKDAYLNIVVGNAFYTKFTSNPIHFLSERNAVYSLNERTFYQFPIQRGSTMAWEPGDSGTMAVVRKWMDKNNILYTRMPFEEKGGLFDQNILKKGKGQVSLRARGALSDIQKYGGYNNATASYFMLVKAEKNGKTIYLLETVPLHLSGRLESIEDKINFCRELWHRDRKDYKNPVICIPKIYKQSLFEVDGFREHISAKTGNQFVMRNAEQLCLNAESAQIIKNVLKFNQRKQVQKELKITVHDKITEENLINIFETFISKIQTSIYRNKFEASVGLMIKGKGTFIELSMEDKCKCIGEILHLFQCNPVLSDLQLIGGKKASGRIYMGKRFDGNKKVFLVLQSVTGFFEKKILLAPYEKK

SEQ ID NO: 1013 - protein, 1363 aa, synthetic construct
  REGION 1..1363: note = MG46-117 effector
MSIMKEINEYYLGLDMGEGSLGWAVTTPDYHVVKKAGKALWGVRLFELAKTAKERRVFRTGRRRIERRNQRIDFLQELFSEAVCEKDPGFYQRLNDSRLWEEDKTERQINSLFNDVDFTDKSYHKKFPTIYHLRQKLMDDSCEFDVRLVYLAIHHILKHRGHFLLENFEIREDGAVGFEEAMADLGNVLGQFLDRSLPVENNDACKEILKNRKLNKLEKLEQLGKLYDAGGDKSIKEIFRLIVGGTAHLAVIFCDETLKNTERGKISFEDAQYEEYKNDVQTILDDRFDVVAACETLHNWAILAELMGNYKYISDAKVAIFNEHRKDLTVLKRLLKRDSNVYTKMFRMAGKNSYSAYVGLCKIHGKKVPIEKACTQGDFAGEIKKIIKNFPDSEDKKYILDKIERNELLPKTVSKQNGVIPYQLHLVELNKILSNAERYLPFLKKEDEYGTVSDKIRKLFTFRIPYYVGPLNGHSPFAWAVRKDENGHIYPWNFERKIDIEASAEEFIRRMTNKCTYLVKKDVLPKNSLLYTEFMVLNELNNVRIGSAQEKLPPGMKARVWERLFLKDKKITAKKMCSYLIREEHISKEEAAQISGIERDFKASLAPWIDMRKILGDNFTVSDSEKIIKDITLFGADKKMLRRRLKARFGYLEDCQVKELVRLPYQGWGRLSKEFLTQILPKAERDSTVLVDQETGEVMNIITALKKTDHNLMELLSGKFGYSAALSEVNTTSVSVCDKAISYKNIQDMRISPAVKRPLWQTLRVIKEIIHIMGKAPSRIFIEMARAEDEKKRKTVSRKDRLLDLYKKCNDEIRHWSADIKKLGEEIKELSDGQLRSDKLYLYYTQMGRSMYTGKPICLGSLMAGADYDIDHIYPRSATGDDSLDNRVLVERTENAKKGDHYPLSIEIQGGRAVFWKVLLDKGFISKEKYRRLTRKTLLTDDEKAGFIGRQLVETRQSTKAIAEILKKAFPETKIIYTKARNVSRFRQYAEFVKVRDMNDYHHAKDAYLNIVVGNAFYTKFTSNPIHFLSEKNAVYSLNERTFYQFPIQRGSTMAWEPGDSGTMAVVRKWMNKNNILYTRMPFEEKGGLFDQNILKKGKGQVSLRARGALSDIQKYGGYNNATASYFMLVKAEKNGKTIYLLETVPLHLSGRLESIEDKINFCRELWHRDRKDYKNPVICIPKIYKQSLFEVDGFREHISAKTGNQFVMRNAEQLCLNAESAQIIKNVLKFNQRKQVQKELKITVHDKITEENLINIFETFISKIQTSIYRNKFEASVGLMIKGKGTFIELSMEDKCKCIGEILHLFQCNPVLSDLQLIGGKKASGRIYMGKRFDGNKKVFLVLQSVTGFFEKKILLAPYEKK

SEQ ID NO: 1014 - protein, 1345 aa, synthetic construct
  REGION 1..1345: note = MG46-118 effector
MKNEKKSFGEYYLGIDAGTDSVGWAVTDGNYNVLKFHGKAMWGVRLFEEAQTAADRRAFRTARRRQGRKVQRTKLLQELFAEEICKKDSAFFIRMADSKYYAEDKTEPQQNALFNDVDYTDKDYHKEYPTVYHLRRAFIEGKDIRDPRLLYLAVHHIINNRGHFLFEGMDLSKVVDFETPFSVLKEYLREEDFGFDFSNIDADALKESLKTKQGITQKKKDLYKLLGKEKGTLKSVCDLLAGGSGIKLTDLFNDESLAGETPEKISLADSSIEDDRTALENILQDRIQLLDCLKAVYDWAILDEILSGSPYISFAKTQSYEKHKKDLALLKKTIKRLCPEKYKEVFKSPNTANNYCAYSGMCVINGKKTAIEKRTTASDFGKYIAKLLSSFDDPDAKDILRQIDAQTFMPKQRTGENSVLPYQVHKVELEKILGNAEMNFPFLLKKDDSNLTVKDKIIKLLTFRIPYYVGPLNDKHRNSGFCWIVRKNTEDTSRILPWEFEQKVDLYASAEQFINRMTNKCTYLVGEDVLPKDSLLYSKYSVLNELNNLKLNGEPLKQEDKENIIKEIYEKKNKVKIKDIANYYKRNGFDVKPDDFTGFHEELKSSLRSYNLFFSLRGEKLDESAVEEAIRAVVLFGNDKKMLSQRLRNIKNGFFSETEINRISGFKFSDWGRLSKKLLTGIKETGETFNIIEALRVTNKNLMQLLSSEFDFKKKIDEENEKINGGIPEFSYDALVKDSYASPAVKRSIWQVLTIAKEIEKITGHAPKKIFMETTREDREKKATKSRKKQLVELYKKCREETSELLKTLEKREDSELRNNALYLYYTQMGKCMYSGETIELEHLFDKNVYDIDHIYPQSKTKDDSLNNKVLVKKELNGQKSDRYPVPRDVLSPGIENHWKCLRSAGLISEEKYKRLTRRTNFSDTELSGFIARQLVETNQATKAAAEILKRVYPETRLVYSRASNVDVFKKRYDILKVREVNDYHHARDAYLNIVVGNVFDVKFTMNPLNFIKGGGTYSLNENMYDSDIRRGNNVALVAGNNGTIATVKKTCSKENILFTRYAFEQKGGLFDQQIMKKGKGQLPTKPSDPHMQGQTEQEWIDKYGGYNKLSGAYFCLVEYKDKGKTVRSIESVPLLVSAKIKNDPSELEKYLKQALGTEELSVRIREIKFNTLFNHNGFLMHITGRTGDQLVFKPALQLKANASDYAYIKKIVRFCEREKESKKAFTVSGFDGIEKDRNIELFDFFTKKLSSDIFMVHHEPTLKSLLANRNIFVDMSVEMQARTIYQILHIFRCNRMLADLTALQGAKSAGIVRMSKRISSKDKTMIINQSPTGLFENSVDLLTV

SEQ ID NO: 1015 - protein, 1329 aa, synthetic construct
  REGION 1..1329: note = MG46-119 effector
MCCGKNAVYLGLDIGSASVGWAVSDETYRLCRFKGKDMWGVRLFGEAQTAAKRRVARVQRRRYDRRNQRLALLQELFQAQIAQVDPAFFQRMDAARLWPDDKPWKYTLFEQEGWTDREYYARYPTVYHLRRALMTQDGPFDVRLVYLALHHILKKRGHFLYADLGDGQLPALEEIMRELELRFEDELSMELRCHDIDALRPLLMDSTLSISARQRQLNVVFAAETRQQKTWVKALTGAKVKLSELYEDPTLEEAEQKEAEFRKAGYEDGLPVLEAVLGDRFALLEAWRSLYNWGVLQRLLGGASSISEAKVRQYEHNKKDLAELKAVLRADRTLYNRVFRATDMPGNYASLVGHAWVEGKKQTVKVCRHEDFCKFIEKVLDTLEQDERVQALRTRAKERTLLPKLISGDNSVIPYQLHRAEMDQILDRAAVYLPFLKEKDAEGLTPADKIRALLVFRTPYYVGPLNPHSPNSWFVRKTEGPIYPWNFEDRVDRVSSAQAFIDRMTSSCTYLRGCDVLPACSPIYERFTVLNELNPMTVKGEPLSIELKQALYEQVFLKIRKPGIRNIVGFLRAQGCDVSREDLGGIDVQGGVKSSLRTTLALREILGEKYDDAQAEEIVLAATYFGDDRRLLREKLRSLGLTDDVIGRLLRLHCAGWGRLSRELLCEVTSFAPGQPDGASILDALWQTNETLMGLLSDRYTFAEAIEARNREVGEESLYEFIDELYVSPSVKRQIRQTVLVARELRKVIGHDPKKIFIEMARGKGKKPERKPERKQTLLACYETFRDEAGVLYNALQQTDNQRLRQDKIYLYYTQMGRCMYSGEHIDLEELLRSESLYDIDHIYPRSRVKDDSIDNRVLVKRTLNEKKGNDYPLSHEIVEAQKAFWSMLLHRNLISREKYQRLTRRTGFTDEELTSFAARQLVETRQGTKAVAQLLGRMMPNSEIVYVKAGLVSDFRHVRSLPKVRELNDLHHAKDAYLNIVVGNIYNTQFTHSPMRYIREHRDNYTINLDSLLKMEIRRGGMLAWNPADGGSIATVRRTMARNSPLVTMMPVIYSGILFDLQPKPQGQGQMPLKKGLSIEKYGGYNKVTGACFMLVEHTLRRRRVRSLIDVPLHLYPDAVSHPELALRHCIEMRDLKEPRIILPIIRMRALLSLDGYKMYITGRTNDNLCIQNANQLMVSEEWEQYIKKIVKAARESMEYERLRGGDGYRPNPRDGLCLEKNLELYNLFVQKMERMPYCQRMSGQRDKLLQARAAFEALDVAQQCCILCQILNLFSREGGEADLTGIGLVKNFGILHPSGMISGCAQALLIHQSPTGLYERVVDLNRL

SEQ ID NO: 1016 - protein, 1393 aa, synthetic construct
  REGION 1..1393: note = MG46-120 effector
MMKEIKKIFIGLDMGTTSVGWAVTDENYEIIKKNGKALWGIRLFDEAQTAEDRRMHRIARRRIERRSRRIDLLQELFAQEICKKDPGFYERLNESGLHEEDKKVHQPNSLFNDVDFNDKAYHKKYPTIYHLRHALMTENHPFDVRLVYLAIHHILKHRGHFLFENFQVDENGVSGFEESFAAFGNALEHIKGESFDMGKEEEMKALCKDKKLGVKHKALALAQCLGRSKDNDFKDMMSLAAGGQATLSKIFKDEGLKDFSKNKVSFSDSQFENDKPEIIAKLGDRYDLIAALHDLYNWSFLAELMRGHKYISEAKIEIYDKHKEDLALLKKVLKQDRSAYNRMFKEPKDEEPKGKKTKEKTTNYSDYVKACKTNGKKLPFPYKKFNHEEFIKTVKSCLKNIPDSPDKKNIENKLEEGTFLPKAVSVENGAIPYQLHLQELKIILSKAEAYLPFLKVRDQYGTVSDKIISLFTFRIPYYVGPINEHAGSCWVVKKDKHGKVYPWNFTEKIDIEKSAEGFIRNLTNKCTYLIGEDVLPKNSLLYSEFTVLNELNNVRIGETMQKLPLSLKEKVMDHLFSRYKHVSRTKFIKYLVSEGIDKKEAESISGLDGDFKNSLSSLIDMKHILGNDFSREDAEKIIKDITIFGGDKKMLKNRLQREFSYLTPEQLTSLTQLSYDGWGRLSKEFLVNLLPAEGDSCEVLVDHTSGEVLNIISAMRQTSYNLMELLGSRFGYGQAIEERNRKEEGQGRITYKDVEDLYISPAVRRPLWQALKIVREIVKITGKEPSKIFIEMARENGEKGKRTISRKARLQALYKKCKDDTRDWTKELKGKPEEDFRSDRLYLYYTQMGRSMYTGKPIDINRLFDRNVYDIDHIYPQSLTGDDSLDNRVLVEKTVNAKKGDTYPLSSALDGCYISGQQIRIQDIQKEMRPFWHMLLEKELISKEKYNRLTRTIPLSDAEKAAFIGRQLVETRQSTKACAELLSKAYPQTRIVYTKAGNASRFRQYGGFIKVRDMNDYHHAKDAYLNIVVGNVFNTRFTANPLYFLKGNHQAYSLNTEALYGHKVSRNGVDAWIPAEKDEKGQVMAGHEGTMGTVRKWMRKNNILFTRMPYEGKGGLFDQNIMKKEKGQVPIKGDSPISNIKKYGGYNKAKAAYFVLTQSKLNKKTVYTLEAIPLILKNSIQSNKDKETYIQKQWRKNGKKMEHPIVCLGHIPVQSLLEINGFKVHLSGKNGKDILLRNAEQLCINEADTAVLKKILKFNQRAAMSKKGEEIFINSFDNIQEEDLNRLYHVFEDKLTNQIYKVKLGKQAAVLKKGEETFNRLSPEQKCKLIGEILHLCQCKATHADLRLIGGAKKAGILTMGTQIYPKDHVYLIEQSVTGFFEKRILLAPFGEK

SEQ ID NO: 1017 - protein, 1345 aa, synthetic construct
  REGION 1..1345: note = MG46-121 effector
MKNEKKSFGEYYLGIDAGTDSVGWAVTDGNYNVLKFHGKAMWGVRLFEEAQTAADRRAFRTARRRQGRKVQRTKLLQELFAEEICKKDSAFFIRMADSKYYAEDKTEPQQNALFNDVDYTDKDYHKEYPTVYHLRRAFIEGKDIRDPRLLYLAVHHIINNRGHFLFEGMDLSKVVDFETPFSVLKEYLREEDFGFDFSNIDADALKESLKTKQGITQKKKDLYKLLGKEKGTLKSVCDLLAGGSGIKLTDLFNDESLAGETPEKISLADSSIEDDRTALENILQDRIQLLDCLKAVYDWAILDEILSGSPYISFAKTQSYEKHKKDLALLKKTIKRLCPEKYKEVFKSPNTANNYCAYSGMCVINGKKTAIEKRTTASDFGKYIAKLLSSFDDPDAKDILRQIDAQTFMPKQRTGENSVLPYQVHKVELEKILGNAEMNFPFLLKKDDSNLTVKDKIIKLLTFRIPYYVGPLNDKHRNSGFCWIVRKNTEDTSRILPWEFEQKVDLYASAEQFINRMTNKCTYLVGEDVLPKDSLLYSKYSVLNELNNLKLNGEPLKQEDKENIIKEIYEKKNKVKIKDIANYYKRNGFDVKPDDFTGFHEELKSSLRSYNLFFSLRGEKLDESAVEEAIRAVVLFGNDKKMLSQRLRNIKNGFFSETEINRISGFKFSDWGRLSKKLLTGIKETGETFNIIEALRVTNKNLMQLLSSEFDFKKKIDEENEKINGGIPEFSYDALVKDSYASPAVKRSIWQVLTIAKEIEKITGHAPKKIFMETTREDREKKATKSRKKQLVELYKKCREETSELLKTLEKREDSELRNNALYLYYTQMGKCMYSGETIELEHLFDKNVYDIDHIYPQSKTKDDSLNNKVLVKKELNGQKSDRYPVPRDVLSPGIENHWKCLRSAGLISEEKYKRLTRRTNFSDTELSGFIARQLVETNQATKAAAEILKRVYPETRLVYSRASNVDVFKKRYDILKVREVNDYHHARDAYLNIVVGNVFDVKFTMNPLNFIKGGGTYSLNENMYDSDIRRGNNVAWVAGNNGTIATVKKTCSKENILFTRYAFEQKGGLFDQQIMKKGKGQLPTKPSDPHMQGQTEQEWIDKYGGYNKLSGAYFCLVEYKDKGKTVRSIESVPLLVSAKIKNDPSELEKYLKQALGTEELSVRIREIKFNILFNHNGFLMHITGRTGDQLVFKPALQLKVNASDYAYIKKIVRFCEREKESKKAFTVSGFDGIEKDRNIELFDFFTKKLSSDIFMVHHEPTLKSLLANRNIFVDMSVEMQARTIYQILHIFRCNRMLADLTALQGAKSAGIVRMSKRISSKDKTMIINQSPTGLFENSVDLLTV

SEQ ID NO: 1018 - protein, 1330 aa, synthetic construct
  REGION 1..1330: note = MG46-122 effector
MERCGKNAAYLGLDIGSTSVGWAVSDETYRLCRVKGKDMWGVRLFEEAQTAAARRVARVQRRRYDRRNQRLALLQELFQAQIARVDPAFFQRMDAARLWSQDKPWKYTLFEQKGWTDREYHAQYPTVYHLRRALMTQDGPFDVRLVYLALHHILKKRGHFLYADLGDGQLPELEEIIRELELRFEDELGMELRCHDIDTLRPLLMDSTLSISARQKQLNAVFAAETKQQKTWVKALTGAKVKLSELYEDPTLEEAEQKEAEFRKAGYEDGLPVLEAVLGDRFALLEAWRSLYNWGVLQRLLGGASSISEAKVRQYEQNKKDLAELKAVLRADRTLYNRVFRATDVPGNYASIVGHAWVEGKKQTVKVCGHEDFCKFIEKVLDTLEQDERVQALRTRAKEGTLLPKLISGDNSVIPYQLHRAEMEQILDRAAVYLPFLKEKDVEGLTPADKIRALLVFRIPYYVGPLNPHSPNSWFVRKTEGPIYPWNFEDRVDRVRSAQAFIDRMTSSCTYLRGCDVLPACSPIYERFTVLNELNPMTVKGEPLSIELKQALFEQVFLKIRKPGIRNIVGFLRAQGYDVSREDLGGIDVQGGVKSSLRTTLALQEILGEKYDDAKAEEIVLAATYFGDDRRLLREKLRSLGLTDDVIGRLLRLHCAGWGRLSRELLCEVTSFVPGQPDGASILDTLWKTNETLMGLLSDRYTFAEAIEARNREVGEESLYDFIDELYVSPSVKRQIRQTVLVARELRKVIGHDPKKIFIEMARGKEKKPERKPKRKQTLLACYETFQNEAGALYETLMQTDNQRLRQDKIYLYYTQMGRCMYSGERIDLEELLRSESLYDIDHIYPRSRVKDDSIDNRVLVKRTLNEKKGNDYPLSHEIVEGQRAFWSMLLYRKLISREKYERLTRRTGFTDEELTSFAARQLVETRQGTKAVAQLLGRMMPDSEIVYVKAGLVSDFRHARSLPKVRELNDLHHAKDAYLNIVVGNIYNTQFTHSPMRYICEHRDNYTVNLDSLLKMEIHRGGVLAWDPADGGSIATVRRTMARNSPLVTMMSVIYSGILFDLQPKPQGQGQMPLKKGLPIEKYGGYNKVTGACFMLVEHTLRRRRVRSLIDVPLHLYPDAVSHPELALRHCIEMRDLKEPRIILPIIRMRALLSLDGYKMYITGRTNGNLCIQNANQLMVSEEWEQYIKKIVKAARESMEYERLRGGDGYRPNPRDGLCPEKNLALYDLFVQKMERMPYCQRMSGQRDKLLQARAAFEALDVAQQCCILCQLLNLFSRVGGEADLTGIGLVKNFGILHPSGMISGCAQALLIHQSPTGLYERVVDLNRL

SEQ ID NO: 1019 - protein, 1360 aa, synthetic construct
  REGION 1..1360: note = MG46-123 effector
MNKDLNNIDYYIGLDCGTSSVGFAVTDTNYNILKFNGKRMWGSHLFEEAKTAAGRRGFRTARRRLERRRKRILLLQEIFAEEICKVDPTFFIRLNDSKYILEDKTTPDLNILFNDKNYKDKDFFKIYPTAYHLRKALMTEDIKDPRLLYLGIQHILKNRGHFLFPGEGMKAVESIKPLVDDIQNVFEELFDDVTFEYTSIEKLQEALMSKRNSEKKEKLEKEIIISDTKLKASVVRILLGYKVKTTTLFKKEGDEIPDVEFKKASFEESDLPELQDRLSDEEFAFIKAAKGIYDWTLLASIMSGHLYISDAKIELFDSNKADLKHLKEAIKTYAPDKYESFFHSDEKGSYSSYTGKIHGDHVVKRVKRTGTDEFYKKIKNLLEKVPKDDEHVKHILDAIENDSFMPLLKSFRNGTIPYQMNKIELDAILANCSKNFEFLEKKDPDGFSATEKIKELLKFRVPYYVGPLGSNPYGKETKGKNSWVERKTSGRVLPWNIEQKIDYESSAEKFIERMTNKCTYCKDQDVLPKNSLEYSKYMVLNELNNLRICGDRLSVPRKQEIFNELFKKEKKVSISKLTKYINDNCWYSGKIKKEDITGIDGDLKASLSSYFDFKDFLESHRLKADDVDRIIKWATVFSEGGDMLRKRIEREFGEVLTKEEIDKTSKLKYAGWGHFSHKFLYEIQAINKETGELMSVMRMLWETQNNLMELLSNKYEFIEQITKPKTIGKLDYSIVDEMYVSPAVKKETWQTLRIVDELIRIMGHNPQKVFVEVTRSEQEKKRTVSRKQTLIDTLKDATKTDSNYINELRELISKLEEKSESDVSRQDKLYLYFSQCGKCMYTGERIDIEDIYDISKYDIDHIFPRSRTKDDSLTNRVLVKKTTNNRKSNAYPIDDFIRAKMQSFWKFLYEKKFIPKEKYDRLVRNSPLSDEEINGFINRQLVETSQTVKQVTDTLKSLFGEETKVVYSKARNVSDFRNQYGFVKCRSMNDLHHAKDAYLNIVVGNVYDTKYSSNFYLQANGHGYGNLTKLFDFDVKNAWKVGASGTLSVVAKTMNRNDILFTRQLVTKKGKLFDIQLVKKGANKGTLPSKVSDKKLQSAIEDFENKESAYDDWTSKYGGYNSLATSHFAVIKHEEKNKKFVSFVPISMIDAKHLEKPGALMEYCSTTLGLINPTIVRSKLLINTQLKIDGYLFAITGKSTGGKALTLSSNVPLVLSAQSQQTVKNIESFFKKSEKNKDLQPTPKFDKISTENTLDLYCELQKKSKSPIYNKRPGNQSDVLENGVSLFEKLSLLERCKAIREILNYYAMEGNGQSDFTAIGGSKTCGKLTKKAGFDITKSNILIFDQSITGLFEEIEEIKA

SEQ ID NO: 1020 - protein, 1381 aa, synthetic construct
  REGION 1..1381: note = MG46-124 effector
MMKELKNYFVGLDMGTTSVGWAVTDENDEIIKKNGKALWGIRLFEEAETAADRRLHRISRRRIERRSRRIDLLQELFAQEICKKDPGFYERLNESGLYEEDKTIHQPNSLFNDVDFNDKAYHKAYPTIYHLRNALMTEDRVFDVRLVYLAIHHILKHRGHFLFDSFQVDENGASGFEECFGAFGNALDRIKGDSLDVSKEDAMKAACRDKKLGVKQKAAALVQCLGRGKDKAFKAMMTLAAGGTASLSDVFEDDGLKDFDKNKVNFSSIQFEENEPDIMAELGDRYDLIAALQGLYSWSLLAELMGDHKYISEAKIELYEKHGKDLKVLKRVLKQSPIDYAHMFKAQGSKKNTNYSAYVGVCKIKGKKVPVEKCGYEDFAKTVKSCLKNLPDSEDKKYIEKELEQGTFLPKAVSKENGVIPYQLHLQELKKILSRAEAYLPFLKEKDKYGTVSDKIISLFTFRIPYYVGPTNEHAKSCWVVKKDKTGKIYPWNFTEKIDVEKTAEGFIRNLTNKCTYLIGEDVLPKNSLLYTEFMVLNELNNVRIGQTMQKLSPELKEKILENLFRKHKHVARKRFINYLAAEGMDRKEAESISGLDGDFKSSLSSFIDMKGILGKDFKREDVERMITDITIFSGDKKMLRTRLHREFSYLSPKQLTSITRLSYEGWGRLSKELLVNLFPAEGDAYEVLADKTSGEVLNIISAMEQTSFNLMELLSSRFGYAKAIEERNREKEGNGTISYRDVEDMYISPAVKRPLWQALKIVREIVKILGKEPSKIFIEMARENGEKGRRTVSRKARLQELYKKCRDDSRDWAKELEERPEEDFRSDRLYLYYTQMGRSMYTGKPIDINQLFDRNVYDIDHIYPQSLTGDDSLDNRVLVEKTVNAKKGDTYPLGRALDGCHIGGQIHIQDIQKEMRPFWHMLYEKEFISKEKYNRLSRTIPLTDTEKAAFIGRQLVETRQSTKACAELLSKAYPDTRIVYTKAGNASRFRQYGGFIKVRDMNDYHHAKDAYLNIVVGNVFDTRFTSNPIRFLKGNHPVYSLNVEALYGHRVGRGGVDAWIPAEKDEEGHTCPGHEGTMGTVRKWMKKNNILFTRMPFEGKGGFFDQNIMKKGKGQVPLKENSPVSDIEKYGGYNKASSAYFVLTSSKLKNETIYTIETIPLIIKRMIQTNKDKEDYIKQHWKDHGKKMVNPHICYGHIPVQSLLEINGFKVHLTGKSGKDFKLRNAEQLCISNDDAAVLKRVLKYNERSSSSKGKEALLITPFDNIQEVDLNRLYQVFEDKLTNQVYKVKLGKQASVLKKGEGKFNELPLEVKCRVIGEILHLFQCNAAIADLRLIGGAKNAGALTMNPRVSSEDHVYLIEQSVTGFFEKRILLAPYGEK

SEQ ID NO: 1021 - protein, 1349 aa, synthetic construct
  REGION 1..1349: note = MG46-125 effector
MKNEKKSFGEYYLGIDAGTDSVGWAVTDENYNVLKFHGKAMWGVRLFEEAQTAADRRAFRTARRRQGRKVQRTKLLQELFAEEICKKDSAFFIRMADSKYYAEDKTEPQQNALFNDVDYTDKDYHKEYPTVYHLRRAFIEGKDIRDPRLLYLAVHHIINNRGHFLFEGMDLSKVTDFETPFSALRDYLREEDYGFDFSDVDTDSLKECLKTKKGITQKKKELYVLLGNEKGTLKSVCDLLAGGSGIKLMDLFNDESLAGETPEKISLSDSSIEDDRTALENILQDRIQLLDCLKAVYDWAILDEILSGSPYISFAKTQSYEKHKKDLALLKKTIKRLCPEKYKEVFKSPNTANNYCAYSGMCVINGKKMAIEKRTTASDFGKYIAKLLSSFDDSDAKDILRQIDAQTFMPKQRTGENSVLPYQVHKVELEKILGNAEMNFPFLLKKDDSNLTVKDKIIKLLTFRIPYYVGPLNDKHRNSGFCWIVRKNTEDTSRILPWEFEQKVDLYASAEQFINRMTNKCSYLVGEDVLPKDSLLYSEYSVLNELNNLKLNGESLAQSDKAEIIDELYKKNNKVKIKDIANYYKRKGFEVKPDDFTGFHEELKSSLRSYNMFFNILRDRFDESAVEAAIKAIVLFGNDKKMLLQKLRSIKNGYFTEEEIKRMAGFKFSDWGRLSEKMLTGIYSVNKETGEAFNIIEALRTTDKNLMQLLSAEFDFKKQIDAENEKINGGIPEFSYDALVKDCYASPAVKRSIWQVLTIAKEIEKITGHAPKKIFMETTREDREKKATKSRKKQLVELYKKCREETSELLKTLEKREDSELRNNALYLYYTQMGKCMYSGETIELEHLFDKNVYDIDHIYPQSKTKDDSLNNKVLVKKELNGQKSDRYPVPRDVLSPGIENHWKCLRAAGLISEEKYKRLTRRTNFSDTELSGFIARQLVETNQATKAAAEILKRVYPETRLVYSRASNVDVFKKRYDILKVREVNDYHHARDAYLNIVVGNVFDVKFTMNPLNFIKGGGTYSLNENMYDSDIRRGSNVAWVAGNNGTIATVKKTCSKENILFTRYAFEQKGGLFDQQIMKKGKGQLPTKPSDPHMQGQTEQEWIDKYGGYNKLSGAYFCLVEYKDKGKIVRSIESVPLLVSAKIKNDPSDLEKYLKQALGTEELSVRIREIKFNTLFNHNGFLMHITGRTGDYLLFRPALQLKVNASDYAYIKKIVRFCEREKENKKEFSISGFDGIETDKNVKLFDSLAVKLSNKLYSVHYAKTAKSLLSNRESFVVLSAEMQTRTIYQMLHIFQCNRMCANLEPIHGVKNAGTVLMPKKVSFSDKTLIINQSPTGLFENSVDLLTV

SEQ ID NO: 1022 - protein, 1393 aa, synthetic construct
  REGION 1..1393: note = MG46-126 effector
MMKEIKNYFIGLDMGTTSVGWAATDENYEIIKKNGKALWGIRLFDEAQTAEDRRMHRIARRRIERRSRRIDLLQELFAQEICKKDPGFYERLNQSGLHEEDKKVHQPNSLFNDVDFNDKAYHKKYPTIYHLRHALMTENHPFDVRLVYLAIHHILKHRGHFLFENFQVDENGVSGFEESFAAFGNALEHIKGESLDMGKEEEMKALCKDKKLGVKHKALALAQCLGRSKDNDFKDMMSLAAGGQATLSKIFKDEGLKDFSKNKVSFSDSQFENDKPEIIAKLGDRYDLIAALHDLYNWSFLAELMRGHKYISEAKIEIYDKHKEDLALLKKVLKQDRSAYNRMFKEPKDEEPKGKKTKEKTTNYSDYVKACKTNGKKLPFPYKKFNHEEFIKTVKSCLKNIPDSPDKKNIENKLEEGTFLPKAVSIENGAIPYQLHLQELKIILSKAEAYLPFLKVRDQYGTVSDKIISLFTFRIPYYVGPINEHAGSCWVVKKDKQGKVYPWNFTEKIDIEKSAEGFIRNLTNKCTYLIGEDVLPKNSLLYSEFTVLNELNNVRIGEIMQKLPLRLKEKVMDNLFSCYKHVSRTKFIKYLVSEGIDKKEAESISGLDGDFKSSLSSLIDMKHILGNDFSREDAEKMIKDITIFGGDKKMLKNRLHCEFSYLTSEQLTSLTRLSYDGWGRLSREFLVNLLPVEGDSCEVLVDHTSGEVLNIISAMRQTSYNLMELLGSRFGYGQAIEERNRKEEGQGRITYKDVENLYISPAVRRPLWQALKIVREIVKITGKEPSKIFIEMARENGEKGRRTISRKARLQALYKKCRDDTRDWAKELEGKSEEDFRSDRLYLYYTQMGRSMYTGKPIDINRLFDRNVYDIDHIYPQSLTGDDSLDNRVLVEKTVNAKKGDTYPLSSALDGCYISGQQIRIQDIQKEMRPFWHMLLEKELISKEKYNRLSRTTSLSDAEKAAFIGRQLVETRQSTKACAELLSKAYPQTRIVYTKAGNASRFRQYGGFIKVRDMNDYHHAKDAYLNIVVGNVFDTRFTANPLNFLKGNHQAYSLNTEALYGHKVSRSGVDAWIPAEKDEKGQVMAGHEGTMGTVRKWMRKNNILFTRMPLEGKGGLFDQNIMKKGKGQVPLKGDSPVSDIGKYGGYNKAKAAYFVLTQSKLNENTVYTLETIPLILRNNIQSNKDKETYIQKQWKKNGTKMEHPLVCLGHIPVQSLLEINGFKAHLSGKNGKTFSLRNAEQLCINEADTAVLKKILKFNQRAVLSKKGEEISVNPFDNIQEEDLNRLYHVFEDKLTNQIYKVKLGKQAAVLKKGEETFNRLSPEQKCKLIGEILHLCQCNATNADLRLIGGAKNAGALTMSTQIYPKDHVYLIEQSVTGFFEKRILLAPFGEK

SEQ ID NO: 1023 - protein, 1360 aa, synthetic construct
  REGION 1..1360: note = MG46-127 effector
MKEINEYYLGLDMGEGSLGWAVTTPDYHVVKKAGKALWGVRLFESAKTAKERRVFRTGRRRIERRNRRIDFLQELFSEAVCEKDPGFYQRLNDSRLWEEDKTERQINSLFNDVDFTDKSYHKKFPTIYHLRQKLMEDSCEFDVRLVYLAIHHILKHRGHFLLENFEIREDGAVGFEEAMADLGNVLGQFLDRSLPEENNDACKEILKNRKLNKLEKLEQLGKLYDAGGDKSIKEIFRLIVGGTAHLAVIFCDETLKNTERGKISFEDAQYEEYKNDVQTILDDRFDVVAACETLHNWAILAELMGNYKYISDAKVAIFNEHRKDLTVLKRLLKRDSNVYTKMFRMAGKNSYSAYVGLCKIHGKKVPIEKACTQGDFAGEIKKIIKNFPDSEDKKYILDKIERNELLPKAVSKQNGVIPYQLHLVELNKILSNAERYLPFLKKEDEYGTVSDKIRKLFTFRIPYYVGPLNGHSSFAWAVRKDENGHIYPWNFERKIDIEASAEEFIRRMTNKCTYLVKKDVLPKNSLLYTEFMVLNELNNVRIGSAQEKLPPGMKVRVWERLFLKDKKITAKKMCSYLIREEHISKEEAAQISGIERDFKASLAPWIDMRKILGDNFTVSDSEKIIKDITLFGADKKMLRRRLKARFGYLEDCQVKELVRLPYQGWGRLSKEFLTQILPKAERDSTVLVDQETGEVMNIITALKKTDHNLMELLSGKFGYSAALSEVNTTSVSVCDKAISYKNIQDMHISPAVKRPLWQTLRVIKEIIHIMGKAPSRIFIEMARAEDEKKWKTVSRKDRLLDLYKKCKDEIRNWSADIKKLGEEIEELSDGQLRSDKLYLYYTQMGRSMYTGKPICLGSLMAGADYDIDHIYPRSATGDDSLDNRVLVERTENAKKGDHYPLSIEIQGGRAVFWKVLLDKGFISKEKYRRLTRKTLLTDDEKAGFIGRQLVETRQSTKAIAEILKKAFPETKIIYTKARNVSRFRQYAEFVKVRDMNDYHHAKDAYLNIVVGNAFYTKFTSNPIHFLSERNAVYSLNERTFYQFPIQRGSTMAWEPGDSGTMAVVRKWMDKNNILYTRMPFEEKGGLFDQNILKKGKGQVSLRACGALSDIQKYGGYNNATASYFMLVKAEKNGKTIYLLETVPLHLSGRLESIEDKINFCRELWHRDRKDYKNPVICIPKIYKQSLFEVDGFREHISAKTGNQFVMRNAEQLCLNAESAQIIKNVLKFNQRKQVQKELKITVHDKITEENLINIFETFISKIQTSIYRNKFEASVGLMIKGKGTFIELSMEDKCKCIGEILHLFQCNPVLSDLQLIGGKKASGRIYMGKRFDGNKKVFLVLQSVTGFFEKKILLAPYEKK

SEQ ID NO: 1024 - protein, 1345 aa, synthetic construct
  REGION 1..1345: note = MG46-128 effector
MKNEKKSFGEYYLGIDAGTDSVGWAVMDGNYNVLKFHGKAMWGVRLFEEAQTAADRRAFRTARRRQGRKVQRTKLLQELFAEEICKKDSAFFIRMADSKYYAEDKTEPQQNALFNDVDYTDKDYHKEYPTVYHLRRAFIEGKDIRDPRLLYLAVHHIINNRGHFLFEGMDLSKVVDFETPFSVLKEYLREEDFGFDFSNIDADALKESLKTKQGITQKKKDLYKLLGKEKGTLKSVCDLLAGGSGIKLTDLFNDESLAGETPEKISLADSSIEDDRTALENILQDRIQLLDCLKAVYDWAILDEILSGSPYISFAKTQSYEKHKKDLALLKKTIKRLCPEKYKEVFKSPNTANNYCAYSGMCVINGKKTAIEKRTTASDFGKYIAKLLSSFDDPDAKDILRQIDAQTFMPKQRTGENSVLPYQVHKVELEKILGNAEMNFPFLLKKDDSNLTVKDKIIKLLTFRIPYYVGPLNDKHRNSGFCWIVRKNTEDTSRILPWEFEQKVDLYASAEQFINRMTNKCTYLVGEDVLPKDSLLYSKYSVLNELNNLKLNGEPLKQEDKENIIKEIYEKKNKVKIKDIANYYKRNGFDVKPDDFTGFHEELKSSLRSYNLFFSLRGEKLDESAVEEAIRAVVLFGNDKKMLSQRLRNIKNGFFSETEINRISGFKFSDWGRLSKKLLTGIKETGETFNIIEALRVTNKNLMQLLSSEFDFKKKIDEENEKINGGIPEFSYDALVKDSYASPAVKRSIWQVLTIAKEIEKITGHAPKKIFMETTREDREKKATKSRKKQLVELYKKCREETSELLKTLEKREDSELRNNALYLYYTQMGKCMYSGETIELEHLFDKNVYDIDHIYPQSKTKDDSLNNKVLVKKELNGQKSDRYPVPRDVLSPGIENHWKCLRSAGLISEEKYKRLTRRTNFSDTELSGFIARQLVETNQATKAAAEILKRVYPETRLVYSRASNVDVFKKRYDILKVREVNDYHHARDAYLNIVVGNVFDVKFTMNPLNFIKGGGTYSLNENMYDSDIRRGNNVAWVAGNNGTIATVKKTCSKENILFTRYAFEQKGGLFDQQIMKKGKGQLPTKPSDPHMQGQTEQEWIDKYGGYNKLSGAYFCLVEYKDKGKTVRSIESVPLLVSAKIKNDPSELEKYLKQALGTEELSVRIREIKFNTLFNHNGFLMHITGRTGDQLVFKPALQLKVNASDYAYIKKIVRFCEREKESKKAFTVSGFDGIEKDRNIELFDFFTKKLSSDIFMVHHEPTLKSLLANRNIFVDMSVEMQARTIYQILHIFRCNRMLADLTALQGAKSAGIVRMSKRISSKDKTMIINQSPTGLFENSVDLLTV

SEQ ID NO: 1025 - protein, 1378 aa, synthetic construct
  REGION 1..1378: note = MG46-129 effector
MKEIKKIFIGLDMGTNSVGWTATDENYEVIKKNGKALWGIRLFDEAQTAEDRRMHRIARRRIERRSRRIDLLQELFAQEICKKDPGFYERLNESGLYEEDKRVHQTNSLFNDVDFNDKAYYKKYPTIYHLRHALMTENHPFDVRLVYLAIHHILKHRGHFLFENFQTDEKGTSGFDESFAAFGSALDRIKGSSPDVRKADSMKDILKDKKLGVKEKAASLLQCLGQGKEKDFKAMMTLAVGGTASLSDIFNDEKLKDFEKNKVNFSSAQFEENEPDIMAELGDRYDLIAALHGLYNWSLLAELMGEYHYISEAKIAVYDKHKADLKVLKRVLKQSPKAYAEIFREPGSSANKNYSAYVGVCKVKGKKAAIEKCSYEDFTKTLKSCLKDMPDSNDKDYISRELNRGTFLPKSVSKENGVIPYQLHLQELKIILSKAEAYLPFLKVRDQYGTVSDKIISLFTFRIPYYVGPINEHANSCWVVKKDKQGKVYPWNFTEKIDVEKSAEGFIRNLTNKCTYLIGEDVLPKNSLLYSEFTVLNELNNVRIGETMQKLPLSLKEKVMDNLFSCYKHVSRTKFIKYLVSEGIDKKEAESVSGLDGDFKSSLSSLIDMKHILGNDFSREDAEKMIQDITIFGGDKKMLKNRLHREFSYLTPEQLTSLTRLSYDGWGRLSKEFLVHLLPAEGDSCEVLVDHTSGEVLNIISAMRQTSYNLMELLGSRFGYGQAIEERNRKEEGQGRITYKDVEDLYISPAVRRPLWQALKIVREIVKITGKEPSKIFIEMARENGEKGKRTISRKARLQALYKKCRDDTRDWAKELEGKSEEDFRSDRLYLYYTQMGRSMYTGKPIDINRLFDRNVYDIDHIYPQSLTGDDSLDNRVLVEKTVNAKKGDTYPLSSALDGCYISGQQIRIQDIQKEMRPFWHMLLEKELISKEKYNRLTRTIPLSDAEKAAFIGRQLVETRQSTKACAELLSKAYPQTRIVYTKAGNASRFRQYGGFIKVRDMNDYHHAKDAYLNIVVGNVFDTRFTANPLHFLKGNHPVYSLNTEALYGHKVSRSGVDAWIPAEKDEKGQGIEGHEGTMGTVRKWMRKNNILFTRMPLEGKGGLFDQNIMKKGKGQVPLKGDSPISDIGKYGGYNKASIAYMMLVQAEEKGKPVYLLESIPNYVKNKLISDKERQAYCVRTWTAQGNKYRHPQILIPKIRIQSLFEIDGFKAHISGKTDDRFVMRNAQELCMDNALAGALKNILKFIHRKTVQKDAVITEYDGVSDDNTLALYDFFVDKLSSSIYGKKFATQADFLRQSKDKFTNLSLEERCEVLGSILHLFQCNAVLSDFHLLGGSRQAGRIYLKKNIKAQDHVYLIEQSVTGFFEKRILLAPFGEK

SEQ ID NO: 1026 - protein, 1360 aa, synthetic construct
  REGION 1..1360: note = MG46-130 effector
MKEINEYYLGLDMGEGSLGWAVTTPDYHVVKKAGKALWGVRLFELAKTAKERRVFRTGRRRIERRNQRIDFLQELFSEAVCEKDPGFYQRLNDSRLWEEDKTERQINSLFNDVDFTDKSYHKKFPTIYHLRQKLMDDSCEFDVRLVYLAIHHILKHRGHFLLENFEIREDGAVGFEEAMADLGNVLGQFLDRSLPVENNDACKEILKNRKLNKLEKLEQLGKLYDAGGDKSIKEIFRLIVGGTAHLAVIFCDETLKNTERGKISFEDAQYEEYKNDVQTILDDRFDVVAACETLHNWAILAELMGNYKYISDAKVAIFNEHRKDLTVLKRLLKRDSNVYTKMFRMAGKNSYSAYVGLCKIHGKKVPIEKACTQGDFAGEIKKIIKNFPDSEDKKYILDKIERNELLPKAVSKQNGVIPYQLHLVELNKILSNAERYLPFLKKEDEYGTVSDKIRKLFTFRIPYYVGPLNGHSPFAWAVRKDENGHIYPWNFERKIDIEASAEEFIRRMTNKCTYLVKKDVLPKNSLLYTEFMVLNELNNVRIGSAQEKLPPGMKARVWERLFLKDKKITAKKMCSYLIREEHISKEEAAQISGIERDFKASLAPWIDMRKILGDNFTVSDSEKIIKDITLFGADKKILRRRLKARFGYLEDCQVKELVRLPYQGWGRLSKEFLTQILPKAERDSTVLVDQETGEVMNIITALKKTDHNLMELLSGKFGYSAALSEVNTTSVSVCDKAISYKNIQDMSISPAVKRPLWQTLRVIKEIIHIMGKAPSRIFIEMARAEDEKKWKTVSRKDRLLDLYKKCKDEIRNWSADIKKLGEEIKELSDGQLRSDKLYLYYTQMGRSMYTGKPICLGSLMAGADYDIDHIYPRSATGDDSLDNRVLVERTENAKKGDHYPLSIEIQGGRAVFWKVLLDKGFISKEKYRRLTRKTLLTDDEKAGFIGRQLVETRQSTKAIAEILKKAFPETKIIYTKARNVSRFRQYAEFVKVRDMNDYHHAKDAYLNIVVGNAFYTKFTSNPIHFLSEKNAVYSLNERTFYQFPIQRGSTMAWEPGDSGTMAVVRKWMDKNNILYTRMPFEEKGGLFDQNILKKGKGQVSLKAQGALSDIQKYGGYNNATASYFMLVKAEKNGKTIYLLETVPLHLSGRLESIEDKINFCRELWHRDRKDYKNPVICIPKIYKQSLFEVDGFREHISAKTGNQFVMRNAEQLCLNAESAQIIKNVLKFNQRKQAQKELKITVHDKITEENLINIFETFISKIQTSIYRNKFEASVGLMIKGKGTFIELSMEDKCKCIGEILHLFQCNPVLSDLQLIGGKKASGRIYMGKRFDGNKKVFLVLQSVTGFFEKKILLAPYEKK

SEQ ID NO: 1027 - protein, 1349 aa, synthetic construct
  REGION 1..1349: note = MG46-131 effector
MKNEKKSFGEYYLGIDAGTDSVGWAVTDENYNVLKFHGKAMWGVRLFEEAQTAADRRAFRTARRRQGRKVQRTKLLQELFAEEICKKDSAFFIRMADSKYYSEDKTEPQQNALFNDVDYTDKDYHKEYPTVYHLRRAFIEGKDIRDPRLLYLAVHHIINNRGHFLFEGMDLSKVVDFETPFSILKEYLREEDFGFDFSNIDADALKESLKTKQGITQKKKDLYKLLGKEKGTLKSVCDLLAGGSGIKLTDLFNDESLAGETPDKISLSDSSIEDDRTALENILQDRIQLLDCLKAVYDWAILDEILSGSPYISFAKTQSYEKHKKDLALLKKTIKRLCPEKYKEVFKSPNTANNYCAYSGMCVINGKKTAIEKRTTASDFGKYIAKLLSSFDDPDAKDILRQIDAQTFMPKQRTGENSVLPYQVHKVELEKILGNAEMNFPFLLKKDDSNLTVKDKIIKLLTFRIPYYVGPLNDKHRNSGFCWIVRKNTEDTSRILPWEFEQKVDLYASAEQFINRMTNKCSYLVGEDVLPKDSLLYSEYSVLNELNNLKLSGESLAQSDKAEIIDELYKKNNKVKIKDIANYYKRKGFEVKPDDFTGFHEELKSSLRSYNMFFNILRDRFDESAVEAAIKAIVLFGNDKKMLLQKLRSIKNGYFTEEEIKRMAGFKFSDWGRLSEKMLTGIYSVNKETGEAFNIIEALRTTDKNLMQLLSAELDFKKQIDAENEKINGGIPEFSYDALVKDCYASPAVKRSIWQVLTIAKEIEKITGHAPKKIFMETTREDREKKATKSRKKQLVELYKKCREETSGLLKTLEKREDSELRNNALYLYYTQMGKCMYSGETIELEHLFDKNVYDIDHIYPQSKTKDDSLNNKVLVKKELNGQKSDRYPVPRDVLSPGIENHWKCLRAAGLISEEKYKRLTRRTNFSDTELSGFIARQLVETNQATKAAAEILKRVYPETRLVYSRASNVDVFKKRYDILKVREVNDYHHARDAYLNIVVGNVFDVKFTMNPLNFIKGGGTYSLNENMYDSDIRRGNNVAWVAGNNGTIATVKKTCSKENILFTRYAFEQKGGLFNQQIMKKGKGQLPTKPSDPHMQGQTEQEWIDKYGGYNKLSGAYFCLVEYKDKGKIVRSIESVPLLVSAKIKNDPSDLEKYLKQALGTEELSVRIREIKFNTLFNHNGFLMHITGRTGDQLVFKPALQMKVNATDYAYIKKIVRFCEREKESKKEFTVSGFDGIEKDRNIELFDFFTKKLSSDIFMVHHAATLKSLSESRNIFVDMSVEMQARTICQILHIFRCNRMLADLTALQGAKNAGTVLMSKKISPNDKTMIINQSPTGLFENSVDLLTV

SEQ ID NO: 1028 - protein, 1351 aa, synthetic construct
  REGION 1..1351: note = MG46-132 effector
MKKHQDYFLGLDLGTGSVGWCVTDTEYRILKANRKRTIGTVLFSTAETAKERRTLRCARRRLRRQKERLRCLQELFREEIEKVDPGFFFRLQESPYVVEEKQNPDGSRAELPYALFVDKDYTDKEFHAQYPTIYHLRKELMDNPLPHDARLVYLAAEHIIKHRGHFLSSISAEGKEASFEDLLSQFLQLWNEYMDHTLTLLEEEKGKLKEPLLDAGMTKSGKKTAIIRLLGTKEPQLKEMAALLTGASASIEKLFDKEEYKNLEENKIQFDAPSYEEKEEYYREALGDDFEIIARARAIYNWCALSRILKNNPGGRISDARVEDYERHRTDLQLLKKLLRENFPKETQERILKVSEKGLANYPAYIGMTKKNGKKAPVVERCSKEDFYKLLDKEILKNLGDSEEKAYIEQQIRLGGFLPKQKGNGNSVVPYQLHEKELKLILKNAEGYLPFLKEKDESGYTVSEKILQLLTFRIPYYVGPLYGGGGEHSYAWVKRLEDGKVYPWNFEQKIDVEKSAEEFIRRAVSTCSWLKNEKVLPAGSLLFEKFKVLNELNNVRIYGERLEVDIKQRIYQELFCRHLRITKKRLIQYLKKEGIYAKVEPEDISGLDENFQSSLKSLLAFKQIHFDSPVPEQAMEDMIKDITLFGEDPKLLKKRLLVKYPEYGKQIPAIIKTVKCDGWASLSEKLLTGLAVDIPGEGRVGTILYFLWNTRQNLMEILYNPEYSFQDLIKTENGDTGRKDGKISYELVDELYVSPSVKRQIWMALKVIEEVRHFMGCEPKRIFVEMAREKQESKRTSDRKAQIMQLYAAIRTDKDYKELLKELSGCSNDELRKDKLFLYFMQMGRCAYTGKRIPFSDLKYDSLYDIDHIYPRSQTADDSLDNRVLVTAQYNREKKQDLYPIEKETRDEREALWRFWREKKFISDEKYRRLTRATKLTNEELLGFVNRQLVETRQSTKALAEVLNQTKAEQTEIVYVKAKNVTEFRRRYKLLKVRALNDFHHAQDAYLNIVVGNVYHLKFTKDVRRYFLDKGTYRTYNLTKMFDETVKCGEETAWIKGVSIGTVKEMMKNEKILVSRQIYEEKGKLYDVQRLKKGQGQVPVKESGRMSDISRYGGYGSAKNTYFMLVEAEDKKKKESLWILPVPLYLKQKIEGSEEYARSYFEQEYGLCHVRVLKKIRIQSLFVYEGFRMRLAGRSGSQLVFHNANELCLPARHHNTIRQISKHIQELQYDKDAAVSDNGLLTEQDLDALYTELCEKLKGSVYQTMLGGYIEKYESGYEKYQKLTLEKKAQALWQMLKIFQCTPEMPDLTLIGGSKSQGAIRMGMNVTGRKSLALIHQSVTGIYERVEKIRG

SEQ ID NO: 1029 - protein, 1360 aa, synthetic construct
  REGION 1..1360: note = MG46-133 effector
MKEINEYYLGLDMGEGSLGWTVTTPDYHVVKKAGKALWGVRLFESAKTAKERRVFRTGRRRIERRNRRIDFLQELFSEAVCEKDPGFYQRLNDSRLWEEDKTERQINSLFNDVDFTDKSYHKKFPTIYHLRQKLMEDSCEFDVRLVYLAIHHILKHRGHFLLENFEIREDGAVGFEEAMADLGNVLGQFLDRSLPEENNDACKEILKNRKLNKLEKLEQLGKLYDAGGDKSIKEIFRLIVGGTAHLAVIFCDETLKNTERGKISFEDAQYEEYKNDVQTILDDRFDVVAACETLHNWAILAELMGNYKYISDAKVAIFNEHRKDLTVLKRLLKRDSNVYTKMFRMAGKNSYSAYVGLCKIHGKKVPIEKACTQGDFAGEIKKIIKNFPDSEDKKYILDKIERNELLPKAVSKQNGVIPYQLHLVELNKILSNAERYLPFLKKEDEYGTVSDKIRKLFTFRIPYYVGPLNGHSSFAWAVRKDENGHIYPWNFERKIDIEASAEEFIRRMTNKCTYLVKKDVLPKNSLLYTEFMVLNELNNVRIGSAQEKLPPGMKVRVWERLFLKDKKITAKKMCSYLIREEHISKEEAAQISGIERDFKASLAPWIDMRKILGDNFTVSDSEKIIKDITLFGADKKMLRRRLKARFGYLEDCQVKELVRLPYQGWGRLSKEFLTQILPKAERDSTVLVDQETGEVMNIITALKKTDHNLMELLSGKFGYSAALSEVNTTSVSVCDKAISYKNIQDMHISPAVKRPLWQTLRVIKEIIHIMGKAPSRIFIEMARAEDEKKWKTVSRKDRLLDLYKKCKDEIRNWSADIKKLGEEIEELSDGQLRSDKLYLYYTQMGRSMYTGKPICLGSLMAGADYDIDHIYPRSATGDDSLDNRVLVERTENAKKGDHYPLSIEIQGGRAVFWKVLLDKGFISKEKYRRLTRKTLLTDDEKAGFIGRQLVETRQSTKAIAEILKKAFPETKIIYTKARNVSRFRQYAEFVKVRDMNDYHHAKDAYLNIVVGNAFYTKFTSNPIHFLSERNAVYSLNERTFYQFPIQRGSTMAWEPGDSGTMAVVRKWMDKNNILYTRMPFEEKGGLFDQNILKKGKGQVSLRACGALSDIQKYGGYNNATASYFMLVKAEKNGKTIYLLETVPLHLSGRLESIEDKINFCRELWHRDRKDYKNPVICIPKIYKQSLFEVDGFREHISAKTGNQFVMRNAEQLCLNAESAQIIKNVLKFNQRKQVQKELKITVHDKITEENLINIFETFISKIQTSIYRNKFEASVGLMIKGKGTFIELSMEDKCKCIGEILHLFQCNPVLSDLQLIGGKKASGRIYMGKRFDGNKKVFLVLQSVTGFFEKKILLAPYEKK

SEQ ID NO: 1030 - protein, 1341 aa, synthetic construct
  REGION 1..1341: note = MG46-134 effector
MKNEKKSFGEYYLGIDAGTDSVGWAVTDENYNVLKFHGKAMWGVRLFEEAQTAADRRAFRTARRRQGRKVQRTKLLQELFAEEICKKDSAFFIRMADSKYYAEDKTEPQQNALFDDVDYTDKDYHKEYPTVYHLRRAFIEGKDIRDPRLLYLAVHHIINNRGHFLFEGMDLSKVVDFETPFSILKEYLREEDFGFDFSNIDADALKESLKNKQGITQKKKDLYKLLGKEKGTLKSVCDLLAGLFNDESLAGETPDKISLSDSSIEDDRTALENILQDRIQLLDCLKAVYDWAILDEILSGSPYISFAKTQSYEKHKKDLALLKKTIKRLCPEKYKEVFKSPNTANNYCAYSGMCVINGKKTAIEKRTTASDFGKYIAKLLSSFDDPDAKDILRQIDAQTFMPKQRTGENSVLPYQVHKVELEKILGNAEMNFPFLLKKDDSNLTVKDKIIKLLTFRIPYYVGPLNDKHRNSGFCWIVRKNTEDTSRILPWEFEQKVDLYASAEQFINRMTNKCSYLVGEDVLPKDSLLYSEYSVLNELNNLKLSGESLAQSDKAEIIDELYKKNNKVKIKDIANYYKRKGFEVKPDDFTGFHEELKSSLRSYNMFFNILRDRFDESAVEAAIKAIVLFGNDKKMLLQKLRSIKNGYFTEEEIKRMAGFKFSDWGRLSEKMLTGIYSVNKETGEAFNIIEALRTTDKNLMQLLSAELDFKKQIDAENEKINGGIPEFSYDALVKDCYASPAVKRSIWQVLTIAKEIEKITGHAPKKIFMETTREDREKKATKSRKKQLVELYKKCREETSELLKTLEKREDSELRNNALYLYYTQMGKCMYSGETIELEHLFDKNVYDIDHIYPQSKTKDDSLNNKVLVKKELNGQKSDRYPVPRDILSPGIENHWKCLRAAGLISEEKYKRLTRRTNFSDTELSGFIARQLVETNQATKAAAEILKRVYPETRLVYSRASNVDVFKKRYDILKVREVNDYHHARDAYLNIVVGNVFDVKFTMNPLNFIKGGGTYSLNENMYDSDIRRGSNVAWVAGNNGTIATVKKTCSKENILFTRYAFEQKGGLFDQQIMKKGKGQLPTKPSDPHMQGQTEQEWIDKYGGYNKLSGAYFCLVEYKDKGKIVRSIESVPLLVSAKIKNDPSDLEKYLKQALGTEELSVRIREIKFNTLFNHNGFLMHITGRQGNQLIFKPALQLKVNASDYAYIKKIVRFCEREKESKKAFTVSGFDGIEKDRNIELFDFFTKKLSSDIFMVHHAATLKSLLANRSIFVDMSVEMQARTIYQILHIFRCNRMLADLTALQGAKSAGTVLMSKKISLNDKIMIINQSPTGLFENSVDLLTV

SEQ ID NO: 1031 - protein, 1360 aa, synthetic construct
  REGION 1..1360: note = MG46-135 effector
MKEINEYYLGLDMGEGSLGWAVTTPDYHVVKKAGKALWGVRLFELAKTAKERRVFRTGRRRIERRNQRIDFLQELFSEAVCEKDPGFYQRLNDSRLWEEDKTERQINSLFNDVDFTDKSYHKKFPTIYHLRQKLMDDSCEFDVRLVYLAIHHILKHRGHFLLENFEIREDGAVGFEEAMADLGNVLGQFLDRSLPVENNDACKEILKNRKLNKLEKLEQLGKLYDAGGDKSIKEIFRLIVGGTAHLAVIFCDETLKNTERGKISFEDAQYEEYKNDVQTILDDRFDVVAACETLHNWAILAELMGNYKYISDAKVAIFNEHRKDLTVLKRLLKRDSNVYTKMFRMAGKNSYSAYVGLCKIHGKKVPIEKACTQGDFAGEIKKIIKNFPDSEDKKYILDKIERNELLPKAVSKQNGVIPYQLHLVELNKILSNAERYLPFLKKEDEYGTVSDKIRKLFTFRIPYYVGPLNEHSPFAWAVRKDENGHIYPWNFERKIDIEASAEEFIRRMTNKCTYLVKKDVLPKNSLLYTEFMVLNELNNVRIGSAQEKLPPGMKARVWERLFLKDKKITAKKMCSYLIREEHISKEEAAQISGIERDFKASLAPWIDMRKILGDNFTVSDSEKIIKDITLFGADKKMLRRRLKARFGYLEDCQVKELVRLPYQGWGRLSKEFLTQILPKAERDSTVLVDQETGEVMNIITALKKTDHNLMELLSGKFGYSAALSEVNTTSVSVCDKAISYKNIQDMRISPAVKRPLWQTLRVIKEIIHIMGKAPSRIFIEMARAEDEKKWKTVSRKDRLLDLYKKCKDEIRHWSADIKKLGEEIKELSDGQLRSDKLYLYYTQMGRSMYTGKPICLGSLMAGADYDIDHIYPRSATGDDSLDNRVLVERTENAKKGDHYPLSIEIQGGRAVFWKVLLDKGFISKEKYRRLTRKTLLTDDEKAGFIGRQLVETRQSTKAIAEILKKAFPETKIIYTKARNVSRFRQYAEFVKVRDMNDYHHAKDAYLNIVVGNAFYTKFTSNPIHFLSEKNAVYSLNERTFYQFPIQRGSTMAWEPGDSGTMAVVRKWMDKNNILYTRMPFEEKGGLFDQNILKKGKGQVSLRARGALSDIQKYGGYNNATASYFMLVKAEKNGKTIYLLETVPLHLSGRLESIEDKINFCRELWHRDRKDYKNPVICIPKIYKQSLFEVDGFREHISAKTGNQFVMRNAEQLCLNAESAQIIKNVLKFNQRKQVQKELKITVHDKITEENLINIFETFISKIQTSIYRNKFEASVGLMIKGKGTFIELSMEDKCKCIGEILHLFQCNPVLSDLQLIGGKKASGRIYMGKRFDGNKKVFLVLQSVTGFFEKKILLAPYEKK

SEQ ID NO: 1032 - protein, 1392 aa, synthetic construct
  REGION 1..1392: note = MG46-136 effector
MKEIKNYFIGLDMGTTSVGWAATDENYEIIKKNGKALWGIRLFDEAQTAEDRRMHRIARRRIERRSRRIDLLQELFAQEICKKDPGFYERLNQSGLHEEDKKVHQPNSLFNDVDFNDKAYHKKYPTIYHLRHALMTENHPFDVRLVYLAIHHILKHRGHFLFENFQVDENGVSGFEESFAAFGNALEHIKGESLDMGKEEEMKALCKDKKLGVKHKALALAQCLGRSKDKDFKAMMSLAVGGQATLSEIFKDEGLKDFSKNKVNFSNSQFEDNKPEIIAKLGDRYDLIAALHDLYNWSFLAELMKGHKYISEAKIEIYDKHKEDLALLRKVLKQDRSAYNRMFKEPKDEEPKGKKTKEKTTNYSDYVKACKTNGKKLPFPYKKFNHEEFIKTVKSCLKNIPDSPDKKNIENKLEEGTFLPKAVSVENGAIPYQLHLQELKIILSKAEAYLPFLKVRDQYGTVSDKIISLFTFRIPYYVGPINEHANSCWVVKKDKQGKVYPWNFTEKIDIEKSAEDFIRNLTNKCTYLIGEDVLPKNSLLYSEFTVLNELNNVRIGETMQKLPLRLKEKVMDNLFSRHKHVSRTKFIKYLVSEGIDKKEAESISGLDGDFKSSLSSLIDMEHILGNDFSREDAEKMIKDITIFGGDKKMLKNRLHREFSYLTSEQLTSLTRLSYDGWGRLSREFLVNLLPAEGDSCEILVDHTSGEVLNIISAMRQTSYNFMELLGSRFGYGQAIEERNRKEEGQGRITYKDVEDLYISPAVRRPLWQALKIVREIVKITGKEPSKIFIEMARGNGEKGKRTISRKARLQALYKKCKDDTRDWTKELKGKPEEDFRSDRLYLYYTQMGRSMYTGKPIDINRLFDRNVYDIDHIYPQSLTGDDSLDNRVLVEKTVNAKKGNTYPLSSALDGCYISGQQIRIQDIQKEMRPFWHMLLEKELISKEKYNRLSRTIPLSDAEKAAFIGRQLVETRQSTKACAELLSKAYPQTRIVYTKAGNASRFRQYGGFIKVRDMNDYHHAKDAYLNIVVGNVFDTRFTTNPLHFLKGNHPVYSLNTEALYGHKVSRSGVDAWIPAEKDEKGQVIDGHEGTMKTVQKWMRKNNILFTRMPYEGKGGLFDQNIMKKGKGQVPIKGDSLISNIKKYGGYNKAKVAYFVLTQSKLNKKTVYTLEAIPLILKNSIQSNKDKETYIQKQWRKNGKKMEHPIVCLGHIPVQSLLEINGFKVHLSGKNGKDILLRNAEQLCINEADTAVLKKILKFNQRAAMSKKGEEISINSFDNIQEEDLNRLYHVFEDKLTNQIYKVKLGKQAAVLKKGEETFNLLTPEQKCKLIGEILHLCQCNATHADLHLIGGAKEAGALTMSTQINPKDHVYLIEQSVTGFFEKRILLAPFGEK

SEQ ID NO: 1033 - protein, 1360 aa, synthetic construct
  REGION 1..1360: note = MG46-137 effector
MKEINEYYLGLDMGEGSLGWAVTTPDYHVVKKAGKALWGVRLFELAKTAKERRVFRTGRRRIERRNQRIDFLQELFSEAVCEKDPGFYQRLNDSRLWEEDKTERQINSLFNDVDFTDKSYHKKFPTIYHLRQKLMDDSCEFDVRLVYLAIHHILKHRGHFLLENFEIREDGAVGFEEAMADLGNVLGQFLDRSLPVENNDACKEILKNRKLNKLEKLEQLGKLYDAGGDKSIKEIFRLIVGGTAHLAVIFCDETLKNTERGKISFEDAQYEEYKNDVQTILDDRFDVVAACETLHNWAILAELMGNYKYISDAKVAIFNEHRKDLTVLKRLLKRDSNVYTKMFRMAGKNSYSAYVGLCKIHGKKVPIEKACTQGDFAGEIKKIIKNFPDSEDKKYILDKIERNELLPKAVSKQNGVIPYQLHLVELNKILSNAERYLPFLKKEDEYGTVSDKIRKLFTFRIPYYVGPLNGHSPFAWAVRKDENGHIYPWNFERKIDIEASAEEFIRRMTNKCTYLVKKDVLPKNSLLYTEFMVLNELNNVRIGSAQEKLPPGMKARVWERLFLKDKKITAKKMCSYLIREEHISKEEAAQISGIERDFKASLAPWIDMRKILGDNFTVSDSEKIIKDITLFGADKKILRRRLKARFGYLEDCQVKELVRLPYQGWGRLSKEFLTQILPKAERDSTVLVDQETGEVMNIITALKKTDHNLMELLSGKFGYSAALSEVNTTSVSVCDKAISYKNIQDMRISPAVKRPLWQTLRVIKEIIHIMGKAPSRIFIEMARAEDEKKWKTVSRKDRLLDLYKKCKDEIRNWSADIKKLGEEIKELSDGQLRSDKLYLYYTQMGRSMYTGKPICLGSLMAGADYDIDHIYPRSATGDDSLDNRVLVERTENAKKGDHYPLSIEIQGGRAVFWKVLLDKGFISKEKYRRLTRKTLLTDDEKAGFIGRQLVETRQSTKAIAEILKKAFPETKIIYTKARNVSRFRQYAEFVKVRDMNDYHHAKDAYLNIVVGNAFYTKFTSNPIHFLSEKNAVYSLNERTFYQFPIQRGSTMAWEPGDSGTMAVVRKWMDKNNILYTRMPFEEKGGLFDQNILKKGKGQVSLRARGALSDIQKYGGYNNATASYFMLVKAEKNGKTIYLLETVPLHLSGRLESIEDKINFCRELWHRDRKDYKNPVICIPKIYKQSLFEVDGFREHISAKTGNQFVMRNAEQLCLNAESAQIIKNVLKFNQRKQVQKELKITVHDKITEENLINIFETFISKIQTSIYRNKFEASVGLMIKGKGTFIELSMEDKCKCIGEILHLFQCNPVLSDLQLIGGKKASGRIYMGKRFDGNKKVFLVLQSVTGFFEKKILLAPYEKK

SEQ ID NO: 1034 - protein, 876 aa, synthetic construct
  REGION 1..876: note = MG46-138 effector
MKEIKKIFIGLDMGTTSVGWAATDENYEVIKKNGKALWGIRLFDEAQTAEDRRMHRIARRRIERRSRRIDLLQELFAQEICKKDPGFYERLNESGLYEEDKTVHQTNSLFNDVDFNDKAYYKKYPTIYHLRHALMTENHPFDVRLVYLAIHHILKHRGHFLFENFQTDEKGTSGFDESFAAFGSALDRIKGSSPDVRKADSMKDILKDKKLGVKEKAASLLQCLGQGKEKDFKAMMTLAVGGTASLSDIFNDEKLKDFEKNKVNFSSARFEENEPDIMAELGDRYDLIAALHGLYNWSLLAELMGEHHYISEAKIAVYDKHKADLKVLKRVLKQSPKAYAEIFREPGSSANKNYSAYVGVCKVKGKKAAIEKCSYEDFTKTLKSCLKDMPDSNDKDYISRELNMGTFLPKSVSKENGVIPYQLHLQELKIILSKAEAYLPFLKVKDQYGTVSDKIISLFTFRIPYYVGPINEHAGSCWVVKKDKQGKVYPWNFTEKIDIEKSAEGFIRNLTNKCTYLIGEDVLPKNSLLYSEFTVLNELNNVRIGETMQKLPLRLKEKVMDNLFSCHKHVSRTKFIKYLVSEGIDKKEAESISGLDGNFKNSLSSLIDMKHILGNDFSREDAEKIIQDITIFGGDKKMLKKRLHREFSYLTPEQLTSLTRLSYDGWGRLSRELLVNLLPAEGDSCEVLVDHTSGEVLNIISAMRQTSYNLMELLGSRFGYGQAIEERNRKEEGQGRITYKDVEDLYISPAVRRPLWQALKIVREIVKITGKEPSKIFIEMARENGEKGRRTISRKARLQALYKKCRDDTRDWAKELEGKSEEDFRSDRLYLYYTQMGRSMYTGKPIDINRLFDRNVYDIDHIYPQSLTGDDSSREK

SEQ ID NO: 1035 - protein, 1360 aa, synthetic construct
  REGION 1..1360: note = MG46-139 effector
MKEINEYYLGLDMGEGSLGWAVTTPDYHVVKKAGKALWGVRLFELAKTAKERRVFRTGRRRIERRNQRIDFLQELFSEAVCEKDPGFYQRLNDSRLWEEDKTERQINSLFNDVDFTDKSYHKKFPTIYHLRQKLMDDSCEFDVRLVYLAIHHILKHRGHFLLENFEIREDGAVGFEEAMADLGNVLGQFLDRSLPVENNDACKEILKNRKLNKLEKLEQLGKLYDAGGDKSIKEIFRLIVGGTAHLAVIFCDETLKNTERGKISFEDAQYEEYKNDVQTILDDRFDVVAACETLHNWAILAELMGNYKYISDAKVAIFNEHRKDLTVLKRLLKRDSNVYTKMFRMAGKNSYSAYVGLCKIHGKKVPIEKACTQGDFAGEIKKIIKNFPDSEDKKYILDKIERNELLPKAVSKQNGVIPYQLHLVELNKILSNAERYLPFLKKEDEYGTVSDKIRKLFTFRIPYYVGPLNGHSPFAWAVRKDENGHIYPWNFERKIDIEASAEEFIRRMTNKCTYLVKKDVLPKNSLLYTEFMVLNELNNVRIGSAQEKLPPGMKARVWERLFLKDKKITAKKMCSYLIREEHISKEEAAQISGIERDFKASLAPWIDMRKILGDNFTVSDSEKIIKDITLFGADKKILRRRLKARFGYLEDCQVKELVRLPYQGWGRLSKEFLTQILPKAERDSTVLVDQETGEVMNIITALKKTDHNLMELLSGKFGYSAALSEVNTTSVSVCDKAISYKNIQDMSISPAVKRPLWQTLRVIKEIIHIMGKAPSRIFIEMARAEDEKKWKTVSRKDRLLDLYKKCKDEIRNWSADIKKLGEEIKELSDGQLRSDKLYLYYTQMGRSMYTGKPICLGSLMAGADYDIDHIYPRSATGDDSLDNRVLVERTENAKKGDHYPLSIEIQGGRAVFWKVLLDKGFISKEKYRRLTRKTLLTDDEKAGFIGRQLVETRQSTKAIAEILKKAFPETKIIYTKARNVSRFRQYAEFVKVRDMNDYHHAKDAYLNIVVGNAFYTKFTSNPIHFLSEKNAVYSLNERTFYQFPIQRGSTMAWEPGDSGTMAVVRKWMDKNNILYTRMPFEEKGGLFDQNILKKGKGQVSLRARGALSDIQKYGGYNNATASYFMLVKAEKNGKTIYLLETVPLHLSGRLESIEDKINFCRELWHRDRKDYKNPVICIPKIYKQSLFEVDGFREHISAKTGNQFVMRNAEQLCLNAESAQIIKNVLKFNQRKQAQKELKITVHDKITEENLINIFETFISKIQTSIYRNKFEASVGLMIKGKGTFIELSMEDKCKCIGEILHLFQCNPVLSDLQLIGGKKASGRIYMGKRFDGNKKVFLVLQSVTGFFEKKILLAPYEKK

SEQ ID NO: 1036 - protein, 1345 aa, synthetic construct
  REGION 1..1345: note = MG46-140 effector
MKNEKKSFGEYYLGIDAGTDSVGWAVTDENYNVLKFHGKAMWGVRLFEEAQTAADRRAFRTARRRQGRKVQRTKLLQELFAEEICKKDSAFFIRMADSKYYAEDKTEPQQNALFDDVDYTDKDYHKEYPTVYHLRRAFIEGKDIRDPRLLYLAVHHIINNRGHFLFEGMDLSKVVDFETPFSILKEYLREEDFGFDFSNIDADALKESLKNKQGITQKKKDLYKLLGKEKGTLKSVCDLLAGGSGIKLTDLFNDESLAGETPDKISLSDSSIEDDRTALENILQDRIQLLDCLKAVYDWAILDEILSGSPYISFAKTQSYEKHKKDLALLKKTIKRLCPEKYKEVFKSPNTANNYCAYSGMCVINGKKTAIEKRTTASDFGKYIAKLLSSFDDPDAKDILRQIDAQTFMPKQRTGENSVLPYQVHKVELEKILGNAEMNFPFLLKKDDSNLTVKDKIIKLLTFRIPYYVGPLNDKHRNSGFCWIVRKNTEDTSRILPWEFEQKVDLYASAEQFINRMTNKCSYLVGEDVLPKDSLLYSEYSVLNELNNLKLSGESLAQSDKAEIIDELYKKNNKVKIKDIANYYKRKGFEVKPDDFTGFHEELKSSLRSYNMFFNILRDRFDESAVEAAIKAIVLFGNDKKMLLQKLRSIKNGYFTEEEIKRMAGFKFSDWGRLSEKMLTGIYSVNKETGEAFNIIEALRTTDKNLMQLLSAELDFKKQIDAENEKINGGIPEFSYDALVKDCYASPAVKRSIWQVLTIAKEIEKITGHAPKKIFMETTREDREKKATKSRKKQLVELYKKCREETSELLKTLEKREDSELRNNALYLYYTQMGKCMYSGETIELEHLFDKNVYDIDHIYPQSKTKDDSLNNKVLVKKELNGQKSDRYPVPRDILSPGIENHWKCLRAAGLISEEKYKRLTRRTNFSDTELSGFIARQLVETNQATKAAAEILKRVYPETRLVYSRASNVDVFKKRYDILKVREVNDYHHARDAYLNIVVGNVFDVKFTMNPLNFIKGGGTYSLNENMYDSDIRRGSNVAWVAGNNGTIATVKKTCSKENILFTRYAFEQKGGLFDQQIMKKGKGQLPTKPSDPHMQGQTEQEWIGYNKLSGAYFCLVEYKDKGKIVRSIESVPLLVSAKIKNDPSDLEKYLKQALGTEELSVRIREIKFNTLFNHNGFLMHITGRQGNQLIFKPALQLKVNASDYAYIKKIVRFCEREKESKKAFTVSGFDGIEKDRNIELFDFFTKKLSSDIFMVHHAATLKSLLANRSIFVDMSVEMQARTIYQILHIFRCNRMLADLTALQGAKSAGTVLMSKKISLNDKIMIINQSPTGLFENSVDLLTV

SEQ ID NO: 1037 - protein, 1379 aa, synthetic construct
  REGION 1..1379: note = MG46-141 effector
MMKEIKKIFIGLDMGTNSVGWAATDENYEVIKKNGKALWGIRLFDEAQTAEDRRMHRIARRRIERRSRRIDLLQELFAQEICKKDPGFYERLNESGLYEEDKRVHQTNSLFNDVDFNDKAYYKKYPTIYHLRHALMTENHPFDVRLVYLAIHHILKHRGHFLFENFQTDEKGTSGFDESFAAFGSALDRIKGSSPDVRKADSMKDILKDKKLGVKEKAASLLQCLGQGKEKDFKAMMTLAAGGTASLSDIFNDEKLKDFEKNKVNFSSAQFEENEPDIMAELGDRYDLIAALHGLYNWSLLAELMGEHHYISEAKIAVYDKHKADLKVLKRVLKQRPDIYAKIFREPGSSANKNYSAYVGVCKVKGKKAAIEKCSYEDFTKTLKSCLKDMPDSNDKDYISRELNMGTFLPKSVSKENGVIPYQLHLQELKIILSKAEAYLPFLKVRDQYGTVSDKIISLFTFRIPYYVGPINEHAGSCWVVKKDKQGKVYPWNFTEKIDIEKSAEGFIRNLTNKCTYLIGEDVLPKNSLLYSEFTVLNELNNVRIGENMQKLPLSLKEKAMDNLFSCYKHVSRAKFIKYLVSEGIDKKEAESISGLDGDFKSSLSSLIDMKHILGNDFSREDAEKMIKDITIFGGDKKMLKNRLHREFSYLTSEQLTSLTRLSYDGWGRLSREFLVHLLPAEGNSYEVLVDHTSGEVLNIISAMRQTSYNLMELLGSRFGYGQAIEERNRKEEGQGRITYKDVEDLYISPAVRRPLWQALKIVREIVKITGKEPSKIFIEMARENGEKGRRTISRKARLQALYKKCRDDTRDWAKELEGKSEEDFRSDRLYLYYTQMGRSMYTGKPIDINRLFDRNVYDIDHIYPQSLTGDDSLDNRVLVERTVNAKKGDTYPLSSALDGCYISGQQIRIQDIQKEMRPFWHMLLEKELISKEKYNRLTRTIPLSDTEKAAFIGRQLVETRQSTKACAELLSKAYPQTRIVYTKAGNASRFRQYGGFIKVRDMNDYHHAKDAYLNIVVGNVFDTRFTANPFHFLKGNHPVYSLNTEALYGHKVSRNGVDAWIPAEKDEKGQVIDGHEGTMGTVRKWMRKNNILFTRMPLEGKGGLFDQNIMKKGKGQVPLKGDSPISDIGKYGGYNKASIAYMMLVQAEEKGKPVYLLESIPNYVKNKLISDKERQAYCVRTWTAQGNKYRHPQILIPKIRIQSLFEIDGFKAHISGKTDDRFVMRNAQELCMDNALAGALKNVLKFIHRKTVQKDAVITEYDGVSDDNTLALYDFFVDKLSSSIYGKKFATQADFLRQSKDKFMNLPLEERCEVLGSILHLFQCNAVLSDFHLLGGSRQAGRIYLNKKIKAQDHVYLIEQSVTGFFEKRILLAPFGEK

SEQ ID NO: 1038 - protein, 1383 aa, synthetic construct
  REGION 1..1383: note = MG46-142 effector
MKEIKKIFIGLDMGTNSVGWAATDENYEVIKKNGKALWGIRLFDEAQTAEDRRMHRIARRRIERRSRRIDLLQELFAQEICKKDPGFYERLNESGLYEEDKTVHQTNSLFNDVDFNDKAYYKKYPTIYHLRHALMTENHPFDVRLVYLAIHHILKHRGHFLFENFQTDEKGTSGFDESFAAFGSALDRIKGSSPDVRKADSMKDILKDKKLGVKEKAASLLQCLGQGKEKDFNAMMTLAAGGTASLSDIFNDEKLKDFEKNKVNFSGAQFEENEPDIMAELGDRYDLIAALHGLYNWSLLAELMGEHRYISEAKIAVYDKHKADLKVLKRVLKQSPDIYAKIFREPGSNANKNYSAYVGVCKVKGKKAAIEKCSYEDFAKTLKSCLKEMPDNNDKDYISRELDMGTFLPKSVSKENGVIPYQLHLQELKIILSKAEAYLPFLKVRDQYGTVSDKIISLFTFRIPYYVGPINEHANSCWVVKKDKQGKVYPWNFTEKIDIEKSAEGFIRNLTNKCTYLIGEDVLPKNSLLYSEFTVLNELNNVRIGETMQKLPLSLKEKVMDNLFSCYKHVSRTKFIKYLVSEGIDKKEAESISGLDGDFKSSLSSLIDMKHILGNDFSREDAEKMIKDITIFGGDKKMLKNRLHREFSYLTPEQLTSLTQLSYDGWGRLSKEFLVNLLPAEGNSCEVLVDHTSGEVLNIISAMRQTSYNLMELLGSRFGYGQAIEERNRKEEGQGRITYKDVEDLYISPAVRRPLWQALKIVREIVKITGKEPSKIFIEMARENGEKGKRTISRKARLQALYKKCKDDTRDWTKELKGKPEEDFRSDRLYLYYTQMGRSMYTGKPIDINRLFDRNVYDIDHIYPQSLTGDDSLDNRVLVEKTVNAKKGDTYPLSSALDGCYISGQQIRIQDIQKEMRPFWHMLLEKELISKEKYNRLSRTIPLSDAEKAAFIGRQLVETRQSTKACAELLSKAYPQTRIVYTKAGNASRFRQYGGFIKVRDMNDYHHAKDAYLNIVVGNVFDTRFTANPLHFLKGNHPAYSLNTEALYGHKVSRNGVDAWIPAEKDERGQVIEGHEGTMKTVQKWMKKNNILFTRMPYEGKGGLFDQNIVKKKKGQKKKGLVPIKGKPPISDIEKYGGYNKASIAYIMLVQAEEKGKPVYLLESIPNYVKNKLTSDKERQAYCVKTWTVQENKCRNPQILIPKIRIQSLFEIDGFKAHISRKTNDQFAMRNAQELCMDNALAGVLKKVLKFIQRETVQKNAAITEYDGISNDNTSELYDFFVDKLSNSIYGKKFAAQADFLRQSKDKFMNLLLEERCEVLGSILHLFQCNPVLSDLRLLGGKKSTGTILLNKKIKPEDHVYLIEQSVTGFFEKRILLAPFGEK

SEQ ID NO: 1039 - protein, 1393 aa, synthetic construct
  REGION 1..1393: note = MG46-143 effector
MMKEIKNYFIGLDMGTTSVGWAATDENYEIIKKNGKALWGIRLFDEAQTAEDRRMHRIARRRIERRSRRIDLLQELFAQEICKKDPGFYERLNQSGLHEEDKKVHQPNSLFNDVDFNDKAYHKKYPTIYHLRHALMTENHPFDVRLVYLAIHHILKHRGHFLFENFQVDENGVSGFEESFAAFGNALEHIKGESLDMGKEEEMKALCKDKKLGMKHKALALAQCLGRSKDKDFKAMMSLAVGGQATLSEIFKDEGLKDFSKNKVNFSNSQFEDNKPEIIAKLGDRYDLIAALHDLYNWSFLAELMKGHKYISEAKIEIYDKHKEDLALLKKVLKQDRSAYNRMFKEPKDEEPKGKKTKEKTTNYSDYVKACKTNGKKLPFPYKKFNHEEFIKTVKSCLKNIPDSPDKKNIENKLEEGTFLPKAVSVENGAIPYQLHLQELKIILSKAEAYLPFLKVRDQYGTVSDKIISLFTFRIPYYVGPINEHANSCWVVKKDKQGKVYPWNFTEKIDIEKSAEDFIRNLTNKCTYLIGEDVLPKNSLLYSEFTVLNELNNVRIGETMQKLPLRLKEKVMDNLFSRHKHVSRTKFIKYLVSEGIDKKEAESISGLDGDFKSSLSSLIDMEHILGNDFSREDAEKMIKDITIFGGDKKMLKNRLHREFSYLTSEQLTSLTRLSYDGWGRLSREFLVNLLPAEGDSCEILVDHTSGEVLNIISAMRQTSYNFMELLGSRFGYGQAIEERNRKEEGQGRITYKDVEDLYISPAVRRPLWQALKIVREIVKITGKEPSKIFIEMARGNGEKGKRTISRKARLQALYKKCRDDTRDWTKELKGKPEEDFRSDRLYLYYTQMGRSMYTGKPIDINRLFDRNVYDIDHIYPQSLTGDDSLDNRVLVEKTVNAKKGNTYPLSSALDGCYISGQQIRIQDIQKEMRPFWHMLLEKELISKEKYNRLSRTIPLSDAEKTAFIGRQLVETRQSTKACAELLSKAYPQTRIVYTKAGNASRFRQYGGFIKVRDMNDYHHAKDAYLNIVVGNVFDTRFTTNPLHFLKGNHPVYSLNTEALYGHKVSRSGVDAWIPAEKDEKGQVIDGHEGTMKTVQKWMRKNNILFTRMPYEGKGGLFDQNIMKKGKGQVPIKGDSLISNIKKYGGYNKAKVAYFVLTQSKLNKKTVYTLEAIPLILKNSIQSNKDKETYIQKQWRKNGKKMEHPIVCLGHIPVQSLLEINGFKVHLSGKNGKDILLRNAEQLCINEADTAVLKKILKFNQRAAMSKKGEEISINSFDNIQEEDLNRLYHVFEDKLTNQIYKVKLGKQAAVLKKGEETFNLLTPEQKCKLIGEILHLCQCNATHADLHLIGGAKEAGALTMSTQINPKDHVYLIEQSVTGFFEKRILLAPFGEK

SEQ ID NO: 1040 - protein, 1360 aa, synthetic construct
  REGION 1..1360: note = MG46-144 effector
MKEINEYYLGLDMGEGSLGWAVTTPDYHVVKKAGKALWGVRLFESAKTAKERRVFRTGRRRIERRNRRIDFLQELFSEAVCEKDPGFYQRLNDSRLWEEDKTERQINSLFNDVDFTDKSYHKKFPTIYHLRQKLMEDSCEFDVRLVYLAIHHILKHRGHFLLENFEIREDGAVGFEEAMADLGNVLGQFLDRSLPVENNDACKEILKNRKLNKLEKLEQLGKLYDAGGDKSIKEIFRLIVGGTAHLAVIFCDETLKNTERGKISFEDAQYEEYKNDVQTILDDRFDVVAACETLHNWAILAELMGNYKYISDAKVAIFNEHRKDLTVLKRLLKRDSNVYTKMFRMAGKNSYSAYVGLCKIHGKKVPIEKACTQGDFAGEIKKIIKNFPDSEDKKYILDKIERNELLPKAVSKQNGVIPYQLHLVELNKILSNAERYLPFLKKEDEYGTVSDKIRKLFTFRIPYYVGPLNGHSPFAWAVRKDENGHIYPWNFERKIDIEASAEEFIRRMTNKCTYLVKKDVLPKNSLLYTEFMVLNELNNVRIGSAQEKLPPGVKARVWERLFLKDKKITAKKMCSYLIREEHISKEEAAQISGIERDFKASLAPWIDMRKILGDNFTVSDSEKIIKDITLFGADKKMLRRRLKARFGYLEDCQVKELVRLPYQGWGRLSKEFLTQILPKAERDSTVLVDQETGEVMNIITALKKTDHNLMELLSGKFGYSAALSEVNTTSVSVCDKAISYKNIQDMRISPAVKRPLWQTLRVIKEIIHIMGKAPSRIFIEMARAEDEKKWKTVSRKDRLLDLYKKCKDEIRNWSADIKKLGEEIKELSDGQLRSDKLYLYYTQMGRSMYTGKPICLGSLMAGADYDIDHIYPRSATGDDSLDNRVLVERTENAKKGDHYPLSIEIQGGRAVFWKVLLDKGFISKEKYRRLTRKTLLTDDEKAGFIGRQLVETRQSTKAIAEILKKAFPETKIIYTKARNVSRFRQYAEFVKVRDMNDYHHAKDAYLNIVVGNAFYTKFTSNPIHFLSERNAVYSLNERTFYQFPIQRGSTMAWEPGDSGTMAVVRKWMDKNNILYTRMPFEEKGGLFDQNILKKGKGQVSLRARGALSDIQKYGGYNNATASYFMLVKAEKNGKTIYLLETVPLHLSGRLESIEDKINFCRELWHRDRKDYKNPVICIPKIYKQSLFEVDGFREHISAKTGNQFVMRNAEQLCLNAESAQIIKNVLKFNQRKQVQKELKVTVHDKITEENLINIFETFISKIQTSIYRNKFEASVGLMIKGKGTFIELSMEDKCKCIGEILHLFQCNPVLSDLQLIGGKKASGRIYMGKRFDGNKKVFLVLQSVTGFFEKKILLAPYEKK

SEQ ID NO: 1041 - protein, 2392 aa, synthetic construct
  REGION 1..2392: note = MG46-145 effector
MKEINEYYLGLDMGEGSLGWAVTTPDYHVVKKAGKALWGVRLFELAKTAKERRVFRTGRRRIERRNQRIDFLQELFSEAVCEKDPGFYQRLNDSRLWEEDKTERQINSLFNDVDFTDKSYHKKFPTIYHLRQKLMDDSCEFDVRLVYLAIHHILKHRGHFLLENFEIREDGAVGFEEAMADLGNVLGQFLDRSLPVENNDACKEILKNRKLNKLEKLEQLGKLYDAGGDKSIKEIFRLIVGGTAHLAVIFCDETLKNTERGKISFEDAQYEEYKNDVQTILDDRFDVVAACETLHNWAILAELMGNYKYISDAKVAIFNEHRKDLTVLKRLLKRDSNVYTKMFRMAGKNSYSAYVGLCKIHGKKVPIEKACTQGDFAGEIKKIIKNFPDSEDKKYILDKIERNELLPKAVSKQNGVIPYQLHLVELNKILSNAERYLPFLKKEDEYGTVSDKIRKLFTFRIPYYVGPLNGHSPFAWAVRKDGNGHIYPWNFERKIDIEASAEEFIRRMTNKCTYFVKKDVLPKNSLLYTEFMVLNELNNVRIGSAQEKLPPGMKARVWERLFLKDKKITAKKMCSYLIREEHISKEEAAQISGIERDFKASLAPWIDMRKILGDNFTVSDSEKIIKDITLFGADKKMLRRRLKARFGYLEDCQVKELVRLPYQGWGRLSKEFLTQILPKAERDSTVLVDQETGEVMNIITALKKTDHNLMELLSGKFGYSAALSEVNTTSVSVCDKAISYKNIQDMRISPAVKRPLWQTLRVIKEIIHIMGKAPSRIFIEMARAEDEKKWKTVSRKDRLLDLYKKCKDEIRNWSADIKKLGEEIKELSDGQLRSDKLYLYYTQMGCSMYTGKPICLGSLMAGADYDIDHIYPRSATGDDSLDNRVLVERTENAKKGDHYPLSIEIQGGRAVFWKVLLDKGFISKEKYRRLTRKTLLTDDEKAGFIGRQLVETRQSTKAIAEILKKAFPETKIIYTKARNVSRFRQYAEFVKVRDMNDYHHAKDAYLNIVVGNAFYTKFTSNPIHFLSEKNAVMKEINEYYLGLDMGEGSLGWAVTTPDYHVVKKAGKALWGVRLFELAKTAKERRVFRTGRRRIERRNQRIDFLQELFSEAVCEKDPGFYQRLNDSRLWEEDKTERQINSLFNDVDFTDKSYHKKFPTIYHLRQKLMDDSCEFDVRLVYLAIHHILKHRGHFLLENFEIREDGAVGFEEAMADLGNVLGQFLDRSLPVENNDACKEILKNRKLNKLEKLEQLGKLYDAGGDKSIKEIFRLIVGGTAHLAVIFCDETLKNTERGKISFEDAQYEEYKNDVQTILDDRFDVVAACETLHNWAILAELMGNYKYISDAKVAIFNEHRKDLTVLKRLLKRDSNVYTKMFRMAGKNSYSAYVGLCKIHGKKVPIEKACTQGDFAGEIKKIIKNFPDSEDKKYILDKIERNELLPKAVSKQNGVIPYQLHLVELNKILSNAERYLPFLKKEDEYGTVSDKIRKLFTFRIPYYVGPLNGHSPFAWAVRKDGNGHIYPWNFERKIDIEASAEEFIRRMTNKCTYFVKKDVLPKNSLLYTEFMVLNELNNVRIGSAQEKLPPGMKARVWERLFLKDKKITAKKMCSYLIREEHISKEEAAQISGIERDFKASLAPWIDMRKILGDNFTVSDSEKIIKDITLFGADKKMLRRRLKARFGYLEDCQVKELVRLPYQGWGRLSKEFLTQILPKAERDSTVLVDQETGEVMNIITALKKTDHNLMELLSGKFGYSAALSEVNTTSVSVCDKAISYKNIQDMRISPAVKRPLWQTLRVIKEIIHIMGKAPSRIFIEMARAEDEKKWKTVSRKDRLLDLYKKCKDEIRNWSADIKKLGEEIKELSDGQLRSDKLYLYYTQMGCSMYTGKPICLGSLMAGADYDIDHIYPRSATGDDSLDNRVLVERTENAKKGDHYPLSIEIQGGRAVFWKVLLDKGFISKEKYRRLTRKTLLTDDEKAGFIGRQLVETRQSTKAIAEILKKAFPETKIIYTKARNVSRFRQYAEFVKVRDMNDYHHAKDAYLNIVVGNAFYTKFTSNPIHFLSEKNAVYSLNERTFYQFPIQRGSTMAWEPGDSGTMAVVRKWMDKNNILYTRMPFEEKGGLFDQNILKKGKGQVSLRARGALSDIQKYGGYNNATASYFMLVKAEKNGKTIYLLETVPLHLSGRLESIEDKINFCRELWHRDRKDYKNPVICIPKIYKQSLFEVDGFREHISAKTGNQFVMRNAEQLCLNAESAQIIKNVLKFNQRKQVQKELKITVHDKITEENLINIFETFISKIQTSIYRNKFEASVGLMIKGKGTFIELSMEDKCKCIGEILHLFQCNPVLSDLQLIGGKKASGRIYMGKRFDGNKKVFLVLQSVTGFFEKKILLAPYEKK

SEQ ID NO: 1042 - protein, 990 aa, synthetic construct
  REGION 1..990: note = MG46-146 effector
MYTRGFCRGNKKIIKNFPDSEDKKYILDKIERNELLPKAVSKQNGVIPYQLHLVELNKILSNAERYLPFLKKEDEYGTVSDKIRKLFTFRIPYYVGPLNGHSPFAWAVRKDGNGHIYPWNFERKIDIEASAEEFIRRMTNKCTYLVKKDVLPKNSLLYTEFMVLNELNNVRIGSAQEKLPPGMKARVWERLFLKDKKITAKKMCSYLIREEHISKEEAAQISGIERDFKASLAPWIDMRKILGDNFTVSDSEKIIKDITLFGADKKMLRRRLKARFGYLEDCQVKELVRLPYQGWGRLSKEFLTQILPKAERDSTVLVDQETGEVMNIITALKKTDHNLMELLSGKFGYSAALSEVNTTSVSVCDKAISYKNIQDMRISPAVKRPLWQTLRVIKEIIHIMGKAPSRIFIEMARAEDEKKRKTVSRKDRLLDLYKKCNDEIRHWSADIKKLGEEIKELSDGQLRSDKLYLYYTQMGRSMYTGKPICLGSLMAGADYDIDHIYPRSATGDDSLDNRVLVEKTENAKKGDHYPLSVEIQRERADFWKILLDKGLISKEKYHRLTRKTLLTDDEKAGFIGRQLVETRQSTKAVAEILKKAFPETKIIYTKARNVSRFRQYAGFVKVRDMNDYHHAKDAYLNIVVGNAFYTKFTSNPVHFLSEKNAVYSLNEKSFYQFPIQRGSTMAWEPGDNGTMAVVRKWMDKNNILYTRMPFEEKGGLFDQNIRKKGKGQVSLKAQGALSDIQKYGGYNKATASYFMLVKAEKNGKRIYLLETVPLHLSERLESIDDKTDFCRELWHKEGKGYKNPVICIPKIYKQSLFEVDGFREHISAKTGDRFVMRNAEQLCLNAESAQIIKNVLKFNQRKQVQKELKVTVHDKITEENLINIFEAFISKIQTSIYRNKFKKFVSLMIKEKGTFIELSMEDKCKCIGEILHLFQCNPVLSNLQLIGGEKASGKISMGKKFDGNEKVFLILQSVTGFFEKKILLAPYEKK

SEQ ID NO: 1043 - protein, 1378 aa, synthetic construct
  REGION 1..1378: note = MG46-147 effector
MMKELKNYFVGLDMGTTSVGWAVTDENYEIIKKNGKALWGIRLFEEAQTAAERRMHRISRRRIERRSRRIDLLQELFAQEICKKDPGFYERLNESGLYEEDKTVHQKNSLFNDVDFDDKAYYKEYPTIYHLRYDLMTKDRPFDVRLVYLAVHHILKHRGHFLFDSFQIDENGASGFDESFAAFGNALYRIRGISLDVRGTDTVKDIFRNKKLGVKEKAKALLQALGKEKEKDFKAMMTLAAGGTALLSDILGEEGMKDFEKNKVSFSSAQFEENEPDIMAELGDRYDLIAALHGLYNWSLLAELIGNYRYISEAKKAIYNKHKEDLKVLKRVLKQNPAVYAKIFKEPGSKSNKNYSAYVGVCKVKGKKAAIDKCSYEDFAKTLKSCLKDLPDSKDTEYISRELEQGTFLPKSVTKENGVIPYQLHLQELKKILANAEKYLPFLKIKDAYGTVSDKIISLFTFRIPYYVGPVNEHANSCWAVKKDKKGKVYPWNFSEKIDVEKSAEGFIRNLTNKCTYLIGEDVLPKNSLLYSEFTVLNELNNVRIGENAQKLSPELKEKVLENLFKKHKHVSRRKFINYLVTEGIDKKEAESISGLDGDFKSSLSSLIDLTNILGNDFSREDGEQMIKDITIFGGDRKMLKSRLHREFPYLTPEQLTRLIHLSYQGWGRLSKELLVNLLPAEKSTGEVLVDKGSGEVLNIISAMEQTSYNLMELLSSRFGYATAIEERNREKEGNGTISYQDVEDMYISPAVKRPLWQALKIVREIVKILGKEPSKIFIEMARENGEKGKRTISRKARLQELYKKCRDDSRDWAKELAEKPEEDFRSDRLYLYYTQMGHSMYTGKPIDINQLFDRNVYDIDHIYPQSLTGDDSLDNRVLVEKTVNAKKGDTYPLGSALDGCHIGGQIHIQDIQKEMRPFWRMLLEKGLISKEKYNRLSRTTPLSDTEKAAFIGRQLVETRQSTKACAELLSKAYPQAGIVYTKAGNASRFRQYGGFIKVRDMNDYHHAKDAYLNIVVGNVFDTRFTSNPIRFLKGNHPVYSLNVEALYGHRVSRGGVDAWIPPEKDDEGHIMAGHEGTMGTVRKWMRKNNILFTRMPLEGKGGLFDQTIMKKGKGQVPLKGDSPVSDIEKYGGYNKASVAYMMLVKAEEKGEPAYILESVPNYVKNQLKTDKERQEYCAGIWVAQGSRYTNPEICIPEIRIQSLFEMNGFKAHISGKTGNLYVMRNAQELCMDDLLAKILKNVLKFNNRKAVQKDAVVTAYDGITDENTLELYDFFADKLSHSIYRKKLSAQADFLDQSKDKFAGLPLEERCEVLGAILHLFQCNAVLSDFHLLGGSRQAGRIYLNKKIKAQDHVYLIEQSVTGFFEKRILLAPYGEK

SEQ ID NO: 1044 - protein, 1360 aa, synthetic construct
  REGION 1..1360: note = MG46-148 effector
MKEINEYYLGLDMGEGSLGWAVTTPDYHVVKKAGKALWGVRLFELAKTAKERRVFRTGRRRIERRNQRIDFLQELFSEAVCEKDPGFYQRLNDSRLWEEDKTERQINSLFNDVDFTDKSYHKKFPTIYHLRQKLMDDSCEFDVRLVYLAIHHILKHRGHFLLENFEIREDGAVGFEEAMADLGNVLGQFLDRSLPVENNDACKEILKNRKLNKLEKLEQLGKLYDAGGDKSIKEIFRLIVGGTAHLAVIFCDETLKNTERGKISFEDAQYEEYKNDVQTILDDRFDVVAACETLHNWAILAELMGNYKYISDAKVAIFNEHRKDLTVLKRLLKRDSNVYTKMFRMAGKNSYSAYVGLCKIHGKKVPIEKACTQGDFAGEIKKIIKNFPDSEDKKYILDKIERNELLPKAVSKQNGVIPYQLHLVELNKILSNAERYLPFLKKEDEYGTVSDKIRKLFTFRIPYYVGPLNGHSPFAWAVRKDGNGHIYPWNFERKIDIEASAEEFIRRMTNKCTYFVKKDVLPKNSLLYTEFMVLNELNNVRIGSAQEKLPPGMKARVWERLFLKDKKITAKKMCSYLIREEHISKEEAAQISGIERDFKASLAPWIDMRKILGDNFTVSDSEKIIKDITLFGADKKMLRRRLKARFGYLEDCQVKELVRLPYQGWGRLSKEFLTQILPKAERDSTVLVDQETGEVMNIITALKKTDHNLMELLSGKFGYSAALSEVNTTSVSVCDKAISYKNIQDMRISPAVKRPLWQTLRVIKEIIHIMGKAPSRIFIEMARAEDEKKWKTVSRKDRLLDLYKKCKDEIRNWSADIKKLGEEIKELSDGQLRSDKLYLYYTQMGRSMYTGKPICLGSLMAGADYDIDHIYPRSATGDDSLDNRVLVERTENAKKGDHYPLSIEIQGGRAVFWKVLLDKGFISKEKYRRLTRKTLLTDDEKAGFIGRQLVETRQSTKAIAEILKKAFPETKIIYTKARNVSRFRQYAEFVKVRDMNDYHHAKDAYLNIVVGNAFYTKFTSNPIHFLSEKNAVYSLNERTFYQFPIQRGSTMAWEPGDSGTMAVVRKWMDKNNILYTRMPFEEKGGLFDQNILKKGKGQVSLRARGALSDIQKYGGYNNATASYFMLVKAEKNGKTIYLLETVPLHLSGRLESIEDKINFCRELWHRDRKDYKNPVICIPKIYKQSLFEVDGFREHISAKTGNQFVMRNAEQLCLNAESAQIIKNVLKFNQRKQVQKELKITVHDKITEENLINIFETFISKIQTSIYRNKFEASVGLMIKGKGTFIELSMEDKCKCIGEILHLFQCNPVLSDLQLIGGKKASGRIYMGKRFDGNKKVFLVLQSVTGFFEKKILLAPYEKK

SEQ ID NO: 1045 - protein, 1381 aa, synthetic construct
  REGION 1..1381: note = MG46-149 effector
MKEIKKIFIGLDMGTTSVGWAATDENYEVIKKNGKALWGIRLFDEAQTAEDRRMHRIARRRIERRSRRIDLLQELFAQEICKKDPGFYERLNESGLHEEDKSIRQANSLFNDDDYDDKAYHKKYPTIYHLRHALMTENHPFDVRLVYLAIHHILKHRGHFLFENFQTDEKGTSGFDESFAAFGSALDRIRGSSPDVRKADSMKDILKDKKLGVKEKAASLLQCLGQGKEKDFKAMMTLAAGGTASLSDIFNDEKLKDFEKNKVNFSSPQFEENEPDIMAELGDRYDLIAALHGLYNWSLLAELMGEYHYISEAKIAVYDKHKADLKVLKRVLKQSPKAYAKIFREPGSSANKNYSAYVGVCKVKGKKAAIEKCSYEDFTKTLKSCLKDMPDSNDKDYISRELNMGTFLPKSVSKENGVIPYQLHLQELKIILSKAEAYLPFLKVRDQYGTVSDKIISLFTFRIPYYVGPINEHANSCWVVKKDKQGKVYPWNFTEKIDIEKSAEGFIRNLTNKCTYLIGEDVLPKNSLLYSEFTVLNELNNVRIGETMQKLPLRLKEKVMDNLFSCYKHVSRTKFIKYLVSEGIDKKEAESISGLDGDFKSSLSSLIDMKHILGNDFSREDAEKMIQDITIFGGDKKMLKNRLHREFSYLTPEQLTSLTRLSYDGWGRLSREFLVNLLPAEGDSCEVLVDHTSGEVLNIISAMRQTSYNLMELLGSRFGYGQAIEERNRKEEGQGRITYKDVEDLYISPAVRRPLWQALKIVREIVKITGKEPSKIFIEMARENGEKGRRTISRKARLQALYKKCRDDTRDWAKELEGKSEEDFRSDRLYLYYTQMGRSMYTGKPIDINRLFDRNVYDIDHIYPQSLTGDDSLDNRVLVEKTVNAKKGDTYPLSSALDGCYISGQQIRIQDIQKEMRPFWHMLLEKELISKEKYNRLTRTIPLSDAEKAAFIGRQLVETRQSTKACAELLSKAYPQTRIVYTKAGNASRFRQYGGFIKVRDMNDYHHAKDAYLNIVVGNVFNTRFTANPLNFLKENHQVYSLNTEALYGHKVSRNGVDAWIPAEKDEKGQVMAGHEGTMGTVRKWMRKNNILFTRMPYEGKGGLFDQNIMKKEKGQVPIKGDSPISNIKKYGGYNKAKVAYFVLTQSKLNKKTVYTLEAIPLILKNSIQSNKDKETYIQKQWRKNGKKMEHPIVCLGHIPVQSLLEINGFKVHLSGKNGKDILLRNAEQLCINEADTAVLKKILKFNQRAAMSKKGEEIFINSFDNIQEEDLNRLYHVFEDKLTNQIYKVKLGKQAAVLKKGEETFNRLSPEQKCKLIGEILHLCQCKATHADLRLIGGAKKAGILTMGTQIYPKDHVYLIEQSVTGFFEKRILLAPFGEK

SEQ ID NO: 1046 - protein, 1381 aa, synthetic construct
  REGION 1..1381: note = MG46-150 effector
MKEIKKIFIGLDMGTNSVGWTATDENYEVIKKNGKALWGIRLFDEAQTAEDRRMHRIARRRIERRSRRIDLLQELFAQEICKKDPGFYERLNESGLYEEDKTVHQTNSLFNDVDFNDKAYHKKYPTIYHLCHALMTENHPFDVRLVYLAIHHILKHRGHFLFENFQTDEKGTSGFDESFAAFGSALDRIKGSSPDVRKADSMKDILKDKKLGVKEKAASLLQCLGQGKEKDFKAMMTLAAGGTASLSDIFNDEKLKDFEKNKVNFSSAQFEENEPDIMAELGDRYDLIAALHGLYNWSLLAELMGEHHYISEAKIAVYDKHKADLKVLKRVLKQSPDIYAKIFREPGSSANKNYSAYVGVCKVKGKKAAIEKCSYEDFTKTLKSCLKDMPDSNDKDYISRELNMGTFLPKSVSKENGVIPYQLHLQELKIILSKAEAYLPFLKVKDQYGTVSDKIISLFTFRIPYYVGPVNEHAGSCWVVKKDKQGKVYPWNFTEKIDIEKSAEGFIRNLTNKCTYLIGEDVLPKNSLLYSEFTVLNELNNVRIGETMQKLPLRLKEKVMDNLFSCHKHVSRTKFIKYLVSEGIDKKEAESISGLDGDFKSSLSSLIDMKHILGNDFSREDAEKMIKDITIFGGDKKMLKNRLHREFSYLTPEQLTSLTRLSYDGWGRLSREFLVNLLPAEGDSCEVLVDHTSGEVLNIISAMRQTSYNLMELLGSRFGYGQAIEERNRKEEGQGRITYKDVEDLYISPAVRRPLWQALKIVREIVKITGKEPSKIFIEMARENGEKGRRTISRKARLQALYKKCRDDTRDWAKELEGKSEEDFRSDRLYLYYTQMGRSMYTGKPIDINRLFDRNVYDIDHIYPQSLTGDDSLDNRVLVEKTVNAKKGDTYPLSSALDGCYISGQQIRIQDIQKEMRPFWHMLLEKELISKEKYNRLSRTTTLSDAEKAAFIGRQLVETRQSTKACAELLSKAYPQTRIVYTKAGNASRFRQYGGFIKVRDMNDYHHAKDAYLNIVVGNVFDTRFTANPFHFLKGNHPVYSLNTEALYGHKVSRNGVDAWIPAEKDEKGQVIDGHEGTMGTVRKWMRKNNILFTRMPLEGKGGLFDQNIMKKGKGQVPLKGDSPVSDIGKYGGYNKAKAAYFVLTQSKLNENTVYTLETIPLILRNNIQSNKDKETYIQKQWKKNGTKMEHPLVCLGHIPVQSLLEINGFKAHLSGKNGKTFSLRNAEQLCINEADTAVLKKILKFNQRAVLSKKGEEISINPFDNIQEEDLNRLYHVFEDKLTNQIYKVKLGKQAAVLKKGEETFNRLSPEQKCKLIGEILHLCQCNATNADLRLIGGAKNAGALTMSTQIYPKDHVYLIEQSVTGFFEKRILLAPFGEK

SEQ ID NO: 1047 - protein, 576 aa, synthetic construct
  REGION 1..576: note = MG46-151 effector
MKEINEYYLGLDMGEGSLGWAVTTPDYHVVKKAGKALWGVRLFESAKTAKERRVFRTGRRRIERRNRRIDFLQELFSEAVCEKDPGFYQRLNDSRLWEEDKTERQINSLFNDVDFTDKSYHKKFPTIYHLRQKLMEDSCEFDVRLVYLAIHHILKHRGHFLLENFEIREDGAVGFEEAMADLGNVLGQFLDRSLPVENNDACKEILKNRKLNKLEKLEQLGKLYDAGGDKSIKEIFRLIVGGTAHLAVIFCDETLKNTERGKISFEDAQYEEYKNDVQTILDDRFDVVAACETLHNWAILAELMGNYKYISDAKVAIFNEHRKDLTVLKRLLKRDSNVYTKMFRMAGKNSYSAYVGLCKIHGKKVPIEKACTQGDFAGEIKKIIKNFPDSEDKKYILDKIERNELLPKAVSKQNGVIPYQLHLVELNKILSNAERYLPFLKKEDEYGTVSDKIRKLFTFRIPYYVGPLNGHSPFAWAVRKDENGHIYPWNFERKIDIEASAEEFIRRMTNKCTYLVKKDVLPKNSLLYTEFMVLNELNNVRIGSAQEKLPPGMKARVWERLFLKDKKITAKKCVLI

SEQ ID NO: 1048 - protein, 788 aa, synthetic construct
  REGION 1..788: note = MG46-152 effector
MCSYLIREEHISKEEAAQISGIERDFKASLAPWIDMRKILGDNFTVSDSEKIIKDITLFGADKKMLRRRLKARFGYLEDCQVKELVRLPYQGWGRLSKEFLTQILPKAERDSTVLVDQETGEVMNIITALKKTDHNLMELLSGKFGYSAALSEVNTTSVSVCDKAISYKNIQDMRISPAVKRPLWQTLRVIKEIIHIMGKAPSRIFIEMARAEDEKKWKTVSRKDRLLDLYKKCKDEIRNWSADIKKLGEEIKELSDGQLRSDKLYLYYTQMGRSMYTGKPICLGSLMAGADYDIDHIYPRSATGDDSLDNRVLVERTENAKKGDHYPLSIEIQGGRAVFWKVLLDKGFISKEKYRRLTRKTLLTDDEKAGFIGRQLVETRQSTKAIAEILKKAFPETKIIYTKARNVSRFRQYAEFVKVRDMNDYHHAKDAYLNIVVGNAFYTKFTSNPIHFLSERNAVYSLNERTFYQFPIQRGSTMAWEPGDSGTMAVVRKWMDKNNILYTRMPFEEKGGLFDQNILKKGKGQVSLRARGALSDIQKYGGYNNATASYFMLVKAEKNGKTIYLLETVPLHLSGRLESIEDKINFCRELWHRDRKDYKNPVICIPKIYKQSLFEVDGFREHISAKTGNQFVMRNAEQLCLNAESAQIIKNVLKFNQRKQVQKELKVTVHDKITEENLINIFETFISKIQTSIYRNKFEASVGLMIKGKGTFIELSMEDKCKCIGEILHLFQCNPVLSDLQLIGGKKASGRIYMGKRFDGNKKVFLVLQSVTGFFEKKILLAPYEKK

SEQ ID NO: 1049 - protein, 1379 aa, synthetic construct
  REGION 1..1379: note = MG46-153 effector
MMKEIKKIFIGLDMGTTSVGWAVTDENYEVIKKNGKALWGIRLFDEAQTAEDRRMHRIARRRIERRSRRIDLLQELFAQEICKKDPGFYERLNESGLYEEDKRVHQTNSLFNDVDFNDKAYYKKYPTIYHLRHALMTENHPFDVRLVYLAIHHILKHRGHFLFENFQTDEKGTSGFDESFAAFGSALDRIKGSSPDVRKADSMKDILKDKKLGVKEKSASLLQCLGQGKEKDFKAMMTLAAGGTASLSDIFNDEKLKDFEKNKVNFSSAQFEENEPDIMAELGDRYDLIAALHGLYNWSLLAELMGEYHYISEAKIAVYDKHKADLKVLKRVLKQRPDIYAKIFREPGSSANKNYSAYVGVCKVKGKKAAIEKCSYEDFTKTLKSCLKEMPDNNDKDYISRELNMGTFLPKSVSKENGVIPYQLHLQELKIILSKAEAYLPFLKVRDQYGTVSDKIISLFTFRIPYYVGPINEHANSCWVVKKDKQGKVYPWNFTEKIDIEKSAEGFIRNLTNKCTYLIGEDVLPKNSLLYSEFTVLNELNNVRIGETMQKLPLRLKEKVMDNLFSRHKHVSRTKFIKYLVSEGIDKKEAESISGLDGDFKSSLSSLIDMKHILGNDFSREDAEKMIQDITIFGGDKKMLKNRLHREFSYLTPEQLTSLTQLSYDGWGRLSREFLVNLLPAEGDSYEVLVDHTSGEVLNIISAMRQTSYNLMELLGSRFGYGQAIEERNRKEEGQGRITYKDVEDLYISPAVRRPLWQALKIVREIVKITGKEPSKIFIEMARENGEKGRRTISRKARLQALYKKCRDDTRDWAKELEGKSEEDFRSDRLYLYYTQMGRSMYTGKPIDINRLFDRNVYDIDHIYPQSLTGDDSLDNRVLVEKTVNAKKGDTYPLSSALDGCYISGQQIRIQDIQKEMRPFWHMLLEKELISKEKYNRLSRTTPLSDAEKAAFIGRQLVETRQSTKACAELLSKAYPQTRIVYTKAGNASRFRQYGGFIKVRDMNDYHHAKDAYLNIVVGNVFDTRFTANPLHFLKGNHPVYSLNTEALYGHKVSRNGVDAWIPAEKDEKGQVIDGHEGTMKTVQKWMRKNNILFTRMPLEGKGGLFDQNIMKKGNGQVPLKGDSPISDIEKYGGYNKASIAYMMLVQAEEKGKPVYLLESIPNYVKNKLTSDKERQEYCVRTWTAQGNKYRHPQILIPKVRIQSLFEIDGFKAHISGKTDDRFVMRNAQELCMDNALAGVLKNILKFIHRKTVQKDAVITEYDGVSDDNTLALYDFFVDKLSSSIYGKKFATQSDFLRQSKDKFMNLPLEERCEVLGSILHLFQCNAVLSDFHLLGGSRQAGRIYLNKKIKAQDHVYLIEQSVTGFFEKRILLAPFGEK

SEQ ID NO: 1050 - protein, 1381 aa, synthetic construct
  REGION 1..1381: note = MG46-154 effector
MMKEIKNYFIGLDMGTTSVGWAATDENYEIIKKNGKALWGIRIFDEAQTAADRRMHRIARRRIERRSRRIDLLQELFAQEICKKDPGFYERLNESGLYEEDKTVHQKNSLFNDVDFDDKAYYKEYPTIYHLRYDLMTKDRPFDVRLVYLAVHHILKHRGHFLFDSFQIDENGASGFDESFAAFGNALYRIRGISLDVRGTDTVKDIFRNKKLGVKEKAKALLQALGKEKEKDFKAMMTLAAGGTALLSDILGEEGMKDFEKNKVSFSSAQFEENEPDIMAELGDRYDLIAALHGLYNWSLLAELMGNYRYISEAKKAIYNKHKEDLKVLKRVLKQNPAVYAKIFKEPGSKSNKNYSAYVGVCKVKGKKSSIDKCSYEDFAKTLKSCLKDLPDSKDMEYISRELEQGTFLPKSVTKENGVIPYQLHLQELKKILAIAEKYLPFLKIKDAYGTVSDKIISLFTFRIPYYVGPVNEHANSCWAVKKDKKGKVYPWNFSEKIDVEKSAEGFIRNLTNKCTYLIGEDVLPKNSLLYSEFTVLNELNNVRIGENAQKLSPELKEKVLENLFKKHKHVSRRKFINYLVTEGIDKKEAESISGLDGDFKSSLSSLIDLTNILGNDFSREDGEQMIKDITIFGGDRKMLKSRLHREFPYLTLEQLTRLIHLSYQGWGRLSKELLVNLLPAEKSAGEVLVDKGSGEVLNIISAMAQTSYNLMELLSSRFGYAKAIEERNREKEGNGTISYQDVEDMYISPAVKRPLWQALKIVREIVKILGKEPSKIFIEMARENGEKGKRTISRKARLQELYKKCRDDSRDWAKELAEKPEEDFRSDRLYLYYTQMGRSMYTGKPIDINQLFDRNVYDIDHIYPQSLTGDDSLDNRVLVEKTVNAKKGDTYPLGSALDGCHIGGQIHIQDIQKEMRPFWHMLLEKGLISKEKYNRLSRTTPLSDTEKAAFIGRQLVETRQSTKACAELLSKAYPQARIVYTKAGNASRFRQYGGFIKVRDMNDYHHAKDAYLNIVVGNVFDTRFTSNPLHFLKGNHPVYSLNTEALYGHKVSRGGVDAWIPAEKDEKGHVMAGHEGTMGTVRKWMRKNNILFTRMPLEGKGGLFDQTIMKKGKGQVPLKGDSPVSDIEKYGGYNKASSAYFVLTSSKLKDETIYTIETIPLIIKRMIQTNKDKEDYIKRHWKAHGKKMVNPHICYGHIPVQSLLEINGFKVHLAGKSGKDFKLRNAEQLCISNDDAAVLKSVLKYNERASSPKRKDALLIGPFDNIREVDVNRLYQVFEDKLTNQVYKVKLGKQASVLKKGEGKFNELPLEVKCRVIGEILHLFQCNAAIADLRLIGGAKNAGALTMNPRVSPEDHVYLIEQSVTGFFEKRILLAPYGGK

SEQ ID NO: 1051 - protein, 1349 aa, synthetic construct
  REGION 1..1349: note = MG46-155 effector
MKNEKKSFGEYYLGIDAGTDSVGWAVTDENYNVLKFHGKAMWGVRLFEEAQTAADRRAFRTARRRQGRKVQRTKLLQELFAEEICKKDSAFFIRMADSKYYAEDKTEPQQNALFDDVDYTDKDYHKEYPTVYHLRRAFIEGKDIRDPRLLYLAVHHIINNRGHFLFEGMDLSKVVDFETPFSILKEYLREEDFGFDFSNIDADALKESLKNKQGITQKKKDLYKLLGKEKGTLKSVCDLLAGGSGIKLTDLFNDESLAGETPDKISLSDSSIEDDRTALENILQDRIQLLDCLKAVYDWAILDEILSGSPYISFAKTQSYEKHKKDLALLKKTIKRLCPEKYKEVFKSPNTANNYCAYSGMCVINGKKTAIEKRTTASDFGKYIAKLLSSFDDPDAKDILRQIDAQTFMPKQRTGENSVLPYQVHKVELEKILGNAEMNFPFLLKKDDSNLTVKDKIIKLLTFRIPYYVGPLNDKHRNSGFCWIVRKNTEDTSRILPWEFEQKVDLYASAEQFINRMTNKCSYLVGEDVLPKDSLLYSEYSVLNELNNLKLSGESLAQSDKAEIIDELYKKNNKVKIKDIANYYKRKGFEVKPDDFTGFHEELKSSLRSYNMFFNILRDRFDESAVEAAIKAIVLFGNDKKMLLQKLRSIKNGYFTEEEIKRMAGFKFSDWGRLSEKMLTGIYSVNKETGEAFNIIEALRTTDKNLMQLLSAELDFKKQIDAENEKINGGIPEFSYDALVKDCYASPAVKRSIWQVLTIAKEIEKITGHAPKKIFMETTREDREKKATKSRKKQLVELYKKCREETSELLKTLEKREDSELRNNALYLYYTQMGKCMYSGETIELEHLFDKNVYDIDHIYPQSKTKDDSLNNKVLVKKELNGQKSDRYPVPRDILSPGIENHWKCLRAAGLISEEKYKRLTRRTNFSDTELSGFIARQLVETNQATKAAAEILKRVYPETRLVYSRASNVDVFKKRYDILKVREVNDYHHARDAYLNIVVGNVFDVKFTMNPLNFIKGGGTYSLNENMYDSDIRRGSNVAWVAGNNGTIATVKKTCSKENILFTRYAFEQKGGLFDQQIMKKGKGQLPTKPSDPHMQGQTEQEWIDKYGGYNKLSGAYFCLVEYKDKGKIVRSIESVPLLVSAKIKNDPSDLEKYLKQALGTEELSVRIREIKFNTLFNHNGFLMHITGRQGNQLIFKPALQLKVNASDYAYIKKIVRFCEREKESKKAFTVSGFDGIEKDRNIELFDFFTKKLSSDIFMVHHAATLKSLLANRSIFVDMSVEMQARTIYQILHIFRCNRMLADLTALQGAKSAGTVLMSKKISLNDKIMIINQSPTGLFENSVDLLTV

SEQ ID NO: 1052 - protein, 1379 aa, synthetic construct
  REGION 1..1379: note = MG46-156 effector
MMKEIKKIFIGLDMGTNSVGWAATDENYEVIKKNGKALWGIRLFDEAQTAEDRRMHRIARRRIERRSRRIDLLQELFAQEICKKDPGFYERLNESGLYEEDKRVHQTNSLFNDVDFNDKAYYKKYPTIYHLRHALMTENHPFDVRLVYLAIHHILKHRGHFLFENFQTDEKGTSGFDESFAAFGSALDRIKGSSPDVRKADSMKDILKDKKLGVKEKAASLLQCLGQGKEKDFKAMMTLAAGGTASLSDIFNDEKLKDFEKNKVNFSSAQFEENEPDIMVELGDRYDLIAALHGLYNWSLLAELMGEYHYISEAKIAVYDKHKADLKVLKRVLKQRPDIYAKIFREPGSSANKNYSAYVGVCKVKGKKAAIEKCSYEDFTKTLKSCLKDMPDSNDKDYISRELNMGTFLPKSVSKENGVIPYQLHLQELKIILSKAEAYLPFLKVKDQYGTVSDKIISLFTFRIPYYVGPINEHAGSCWVVKKDKRGKVYPWNFTEKIDIEKSAEGFIRNLTNKCTYLIGEDVLPKNSLLYSEFTVLNELNNVKIGETMQKLPLSLKEKVMDNLFSCYKHVSRTKFIKYLVSEGIDKKEAESISGLDGDFKSSLSSLIDMKHILENDFSREDAEKMIQDITIFGGDKKMLKNRLHREFSYLTPEQLTSLTRLSYDGWGRLSREFLVNLLPAEGNNYEVLVDHTSGEVLNIISAMRQTSYNLMELLGSRFGYGQAIEERNRKEEGQGRITYKDVEDLYISPAVRRPLWQALKIVREIVKITGKEPSKIFIEMARENGEKGRRTISRKARLQALYKKCRDDTRDWAKELEGKSEEDFRSDRLYLYYTQMGRSMYTGKPIDINRLFDRNVYDIDHIYPQSLTGDDSLDNRVLVEKTVNAKKGDTYPLSSALDGCYISGQQIRIQDIQKEMRPFWHMLLEKELISKEKYNRLSRTIPLSDAEKAAFIGRQLVETRQSTKACAELLSKAYPQTRIVYTKAGNASRFRQYGGFIKVRDMNGYHHAKDAYLNIVVGNVFDTRFTANPLHFLKGNHPVYSLNTEALYGHKVSRNGVDAWIPAEKDEKGQVIDGHEGTMGTVRKWMRKNNILFTRMPLEGKGGLFDQNIMKKGNGQVPLKGDSPISDIEKYGGYNKASIAYMMLVQAEEKGKPVYLLESIPNYVKNKLTSDKERQEYCVRTWTAQGNKYRHPQILIPKVRIQSLLEIDGFKAHISGKTGNLFVMRNAQELCMDITLARVLKNVLKFIHRKTVQKDAAITEYDGVSDDNTLALYDFFVDKLSSSIYGKKFATQADFLRQSKDKFTNLPLEERCEVLGSILHLFQCNAVLSDFHLLGGSRQAGRIYLNKKIKAQDHVYLIEQSVTGFFEKRILLAPFGEK

SEQ ID NO: 1053 - protein, 1381 aa, synthetic construct
  REGION 1..1381: note = MG46-157 effector
MMKELKNYFVGLDMGTTSVGWAVTDENDEIIKKNGKALWGIRLFEEAETAADRRMHRISRRRIERRSRRIDLLQELFAQEICKKDPGFYERLNESGLYEEDKTIHQPNSLFNDVDFNDKAYHKAYPTIYHLRNALMTEDRVFDVRLVYLAIHHILKHRGHFLFDSFQVDENGASGFEECFGAFGNALDRIKGDSLDVSKEDAMKAACRDKKLGVKQKAAALVQCLGRGKDKAFKAMMTLAAGGTASLSDVFEDDGLKDFDKNKVNFSSIQFEENEPDIMAELGDRYDLIAALQGLYSWSLLAELMGDHKYISEAKIELYEKHGKDLKVLKRVLKQSPIDYAHMFKAQGSKKNTNYSAYVGVCKIKGKKVPVEKCGYEDFAKTVKSCLKNLPDSEDKKYIEKELEQGTFLPKAVSKENGVIPYQLHLQELKKILSRAEAYLPFLKEKDKYGTVSDKIISLFTFRIPYYVGPTNEHAKSCWVVKKDKTGKIYPWNFTEKIDVEKTAEGFIRNLTNKCTYLIGEDVLPKNSLLYTEFMVLNELNNVRIGQTMQKLSPELKEKILENLFRKHKHVARKRFINYLAAEGMDRKEAESISGLDGDFKSSLSSFIDMKGILGKDFKREDVERMITDITIFSGDKKMLRTRLHREFSYLSPKQLTSITRLSYEGWGRLSKELLVNLFPAEGDAYEVLADKTSGEVLNIISAMEQTSFNLMELLSSRFGYAKAIEERNREKEGNGTISYRDVEDMYISPAVKRPLWQALKIVREIVKILGKEPSKIFIEMARENGEKGRRTVSRKARLQELYKKCRDDSRDWAKELEERPEEDFRSDRLYLYYTQMGRSMYTGKPIDINQLFDRNVYDIDHIYPQSLTGDDSLDNRVLVEKTVNAKKGDTYPLGRALDGCHIGGQIHIQDIQKEMRPFWHMLYEKEFISKEKYNRLSRTIPLTDTEKAAFIGRQLVETRQSTKACAELLSKAYPDTRIVYTKAGNASRFRQYGGFIKVRDMNDYHHAKDAYLNIVVGNVFDTRFTSNPIRFLKGNHPVYSLNVEALYGHRVGRGGVDAWIPAEKDEEGHTCPGHEGTMGTVRKWMKKNNILFTRMPFEGKGGFFDQNIMKKGKGQVPLKENSPVSDIEKYGGYNKASSAYFVLTSSKLKNETIYTIETIPLIIKRMIQTNKDKEDYIKQHWKDHGKKMVNPHICYGHIPVQSLLEINGFKVHLTGKSGKDFKLRNAEQLCISNDDAAVLKRVLKYNERSSSSKGKEALLITPFDNIQEVDLNRLYQVFEDKLTNQVYKVKLGKQASVLKKGEGKFNELPLEVKCRVIGEILHLFQCNAAIADLRLIGGAKNAGALTMNPRVSSEDHVYLIEQSVTGFFEKRILLAPYGEK

SEQ ID NO: 1054 - protein, 913 aa, synthetic construct
  REGION 1..913: note = MG46-158 effector
MKEIKNYFIGLDMGTTSVGWAATDENYEIIKKNGKALWGIRLFDEAQTAADRRMHRIARRRIERRSRRIDLLQELFAQEICKKDPGFYERLNESGLYEEDKTVHQKNSLFNDVDFDDKAYYKEYPTIYHLRYDLMTKDRPFDVRLVYLAVHHILKHRGHFLFDHFQVDENGVSGFEESFAAFGDAFAHIKGESFDMGKEEEMKALCRDKKLGVRHKALALAQCLGRSKDKDFKAMMTLAAGGTALLSEVFKDEGLKDFSKNKVSFSDSQFENDKPEIIAELGDRYDLIAALHGLYNWSFLAELMRGHKYISEAKIEIYDKHKEDLALLKKVLKQDRSVYNLMFKEPGDKKPINYSAYVKACKTNGKKLPLPYGKFKYEEFIKTVKFCLKNLPDSPDKKNIENKLEEGSFLLKAVSVENGAIPYQLHLQELKIILSKAEAYLPFLKVRDQYGTVSDKIISLFTFRIPYYVGPINEHAGSCWVVKKDKQGKVYPWNFTEKIDIEKSAEGFIRNLTNKCTYLIGEDVLPKNSLLYSEFTVLNELNNVRIGENAQKLSPELKEKVLENLFKKHKHVSRRKFINYLATEGIDKKEAESISGLDGDFKSSLSSLIDLTNILGNDFSREDGEQMIKDITIFGGDRKMLKSRLHREFPYLTPEQLTRLIHLSYQGWGRLSKELLVNLLPAEKSTGEVLVDKGSGEVLNIISAMEQTSYNLMELLSSRFGYAKAIEERNREKEGNGTISYQDVEDMYISPAVKRPLWQALKIVREIVKILGKEPSKIFIEMARENGEKGKRTISRKARLQELYKKCRDDSRDWAKELAEKPEEDFRSDRLYLYYTQMGRSMYTGKPIDINQLFDRNVYDIDHIYPQSLTGDDSLDNRVLVEKTVNAKKGDTYPLGSALDGCHIGGQIHIQDI

SEQ ID NO: 1055 - protein, 1345 aa, synthetic construct
  REGION 1..1345: note = MG46-159 effector
MGKREFGEYYLGLDVGSNSVGWAATGLDYQLLRFNQKSMWGTRLFDKVDEANPAAVRRIARTQRRRIQRRNQRLALLQDLFQAEVAKVDPGFFQRLSEGMLREEDKSVRQKHTLFHDANYTDADYHRSYPTIYHLREALLTGDQAFDVRLVYLAVHHILKYRGHFLFAGESVDEVLDLGEQLRALAQAMEDEYDVRFVCEDVSQAEQLLKDRTIPMRRKQKQLERIFNAEDREQRQEKAWIKALTGATVKFSEMFPDVDVAGEEEQKVSFSKDNFDEKAPVWQALLGDRFALLDQLHAVYNWSVLADLLRGEKYLSSAKVRVYEKHGEDLKRLKRVIRRYADRETYRKMFSDANEPNNYCAYSGMAMKNGRKVPIKKRCQYDEFAKAVGKLLKPFPEDEDVRQIRQELEQNTFMPRIVSSDNGVIPNQLHCMELREILRRAARYLPFLNEQDADGLSVSDKVMQIMKFRIPYYVGPLNPASANSWVVRRSRERIYPWNFEQVVDTEASAEAFITRMTNNCTYLKNEDRADEQKVLPEDSILYSRFKVLNELNNLRICGEPVSVELKQEIYRDLFEKRRQVKRAKLVEYLRQRGIHVSDEDIGGLNGDFKSSLKSEIAMKKALGPAYTEEMAEEILRLNAIFGDDRKLLRRRIDRSFGKALSEEQIRAAMAVKSNGWGRLCAAFLTRIVHFDPEQERSYNIITALWETNENLMRLLSGAYTFQEQVNAWNAGGTDVDMDHRLVEELYASAPVKRQIWQAMKVVREVVKITGHAPRRLFIEMARGEDERKEIKESRKRQLLALYERIQDEQRDWVTEIGNQWEERDFRRDALYLYYTQMGRCMYTGEPITLSDLFNQNLYDIEHIYPRSLVKDDSIDNRVLVKKQINLKKANKYPLDAGIRNRCRDFWRLLNARGLISDAKLQRLLRTQGFSETEREGFIARQLVETRQSTKALADILKQALPEAEIVYVKAGNVSEFRQKYEFVKVREINDLHHAKDAYLNIVVGNVYHTRFTADIRGFVQRNEHYNFRKMYEFNVQRGGCTAWRAGDSGTIVTVRRMMAKNNILVTKQVQARQGKLFHVKLDAKKSGLLPRKAGLPSELYGGYNHVNVSYLMLVEHTQENIRCRSLVSVPIHLSAQLGDDEQKLVAYCRQQGYEEPKLLIKRILMNSLISVNGSLGRLMSKTNKSLFLSNARQLHLSIPMEAYFKRVIRFCERAAISQKLHPNQPIQVNAMDGISQEENISAYVELWQKMEKLHGRLLKRLVNKLKNAQPAFQHLNIERQCYVLKQILQLWTESSSQTADLRDIGLSKDTGAISINSKISEYSEVTLFLQSVTGLFDEPVNLLKP

SEQ ID NO: 1056 - protein, 1345 aa, synthetic construct
  REGION 1..1345: note = MG46-160 effector
MGKREFGEYYLGLDVGSNSVGWAATGLDYQLLRFNHKSMWGTRLFDKVDEANPAAVRRIARTQRRRIQRRNQRLALLQDLFQAEVAKVDPGFFQRLSEGMLREEDKSVRQKHTLFHDANYTDADYHRAYPTIYHLREALLTGDQAFDVRLVYLAVHHILKYRGHFLFAGESVDEVLDLGEQLRALAQAMEDEYDVRFVCEDVPQAEQLLKDRTIPMRRKQKQLERIFNAEDREQRQEKAWIKALTGATVKFSEMFPDVDVAGEEEQKVSFSKDNFDEKAPVWQALLGDKFALLDQLHAVYNWSVLADLLRGEKYLSSAKVRVYEKHGEDLKRLKRVIRRYADRETYRKMFSDANEPNNYCAYSGMAMKNGKKVPIKKRCQYDEFAKAVGKLLKPFPEDDDVRQIRQELEQNTFMPRIVSSDNGVIPNQLHCMELREILRRAARYLPFLNERDADGLSVSDKVMQIMKFRIPYYVGPLNPASANSWVVRRSRERIYPWNFEQVVDTEASAEAFITRMTNNCTYLKNEDRADEQKVLPEDSILYSRFKVLNELNNLRICGEPISVELKQEIYRELFEKRRQVKRAKLVEYLRQRGIHVSDEDIGGLNGDFKSSLKSEIAMKKALGPAYTEEMAEEILRLNAIFGDDRKLLRRRIDRSFGKALSEEQIRAAMAVKSNGWGRLCAAFLTRIVHFDPEQERSYNIITALWETNENLMRLLSGAYTFQEQVNAWNAGGTDVDMDHRLVEELYASAPVKRQIWQAMKVVREVVKITGHAPRRLFIEMARGEDERKEIKESRKRQLLALYERIQDEQRDWVTEIGNQWEERDFRRDALYLYYTQMGRCMYTGEPITLSDLFNQNLYDIEHIYPRSLVKDDSIDNRVLVKKQINLKKANNYPLDAGIRNRCRDFWRLLNARGLISDAKLQRLLRTQGFSETEREGFIARQLVETRQSTKALADILKQVLPEAEIVYVKAGNVSEFRQKYEFVKVREINDLHHAKDAYLNIVVGNVYHTRFTADIRSFVQRNEHYNFRKMYEFNVQRGGCTAWRAGDSGTIVTVRRMMAKNNILVTKQVQARQGKLFDVKLDAKKSGLLPRKAGLPSELYGGYDKVKVSYLMLVEHTQENIRCRSLVSVPIHLSAQLGDDEQKLVAYCRQQGYEEPKLLIKRILMNSLISVDGMLGRITAKSDDYLVLCNAQQLHFPMATEVYFKKIVRFCERAATAQKFHPDQPIQVNAMDGLSAEGNLAAYIALYEKLEKLHGRILSDLVKKLKEAQPAFQQQNMARQCYVLKQILRLWSASSRQTADLKDVGLSGHTGTIRVNSRISEYSEVLLIFQSVTGLFEEAVDLLKI

SEQ ID NO: 1057 - protein, 1371 aa, synthetic construct
  REGION 1..1371: note = MG46-161 effector
MEANEYHGDYYLGLDCGTTSVGWAVTDTDYNVLTFNGKRMMGVRLFDEAKTAADRRMARCSRRRTMRRKERLNILQDLFAEEIDKVDPLFFRRLENSKYFREDKDVDCKYALFGDKEYTDSEYFRDYPTIFHLRYELMNSREYHDPRLVYLAIHHILKNRGHFLFPGENMKAVTDASELLKNTENLINQIFSCDDEDFSFVFGDLSEFQETFRIRRPSERKEKMSAACSCTDKKIGDSIIKLINGNKVPLKNLFVLEEDSELFKESVCFKDSDFEDARLPMLEGLLNDDDRTMLLISLKAIYDYILLADILDGCSSVSEGKIRQYAENRKDLASLKYIFRKYLSEQEYEDYFHSEKKGCFSNYIGVIQDNRTGKKTLRRCSYDEFRKNTAGLLKKISAEECDESIVNALSEKLETESFLPLLISSRNSVIPYQLHKMELEAILANASQYLPFLNEKDESGYSVSEKIVMLLTFRIPYYVGPITNSHSSDEQKKYSWLVRREDGKVYPWNFDQKIDRSASAELFINRMKSHCTYLPDFLVIPRNSLLYSKFMVLNEINKLTINGNQITVKQKQDIFDDLYRRNRKVSSKMIKDYAVSKGWASKPVSLGGIDGEPKASLASYYDFRDIIELKRLEWSKVEEIIEKITLFGDDRSMCLEAISRIAGEALDKDEISEIAKRRYTGWGRLSREFLVGLQAESSRTGEITSIISLLWNTNSNLMEIINDPEYRITDQLKGQAIDKLDYKLVDELYVSPSVKRQIWQTLKVCQELEKVMKRAPAKVFVEVARGDSENSGRTKSRKQALQELYESIRKEGLFKEEIDELSASLDKYSEQDISRQDKLYLYFTQMGRCMYSGERIDIESLYDTNIYDIDHIFPQSLTADDSLSNRVLTLKRLNLLKSNKVPIPEEWRSRMADYWKILAKKELISKEKYRRLTRSEPLSDDELQGFINRQLVEVSQSTKATIDILRRYYGETTSVVFAKARNVSYFRQRFSIPKARCLNDLHHAKDAYLNIVVGNTYTTKFTSNFWKYISDSRTSSESSTSSNIPTWKYNLMKMFDWTVEGAWYPGLTGTIVTVKKECWNDDVRLTKQVSEISGALFDLQLVKGNVAEGLTPAKKITDENISADEWTKRYGGYNKQAVSYFIIAEHKNKKKRDISIFPAYCSMKGNLKTKSEIEQFLIQQHNVEEPRIIIPKLMINDLIEYKGMKMRISGKSSSGILVRMEVPLRCCWFVEDYIHKIEKAFQLKQKNKLSYLPYNRNEISSEYNIMLYDFLTMKAGNPSYINRPSCQCGVLQKGHEKFEGLSIDEQLNVLQNIIRYFSSAPGMNDFSAIGGSANAGQLKFSKTVRTKGAGPKFVVIHQSITGLFEKRTVVK

SEQ ID NO: 1058 - protein, 1079 aa, synthetic construct
  REGION 1..1079: note = MG46-162 effector
MLLISLKAIYDYILLADILDGCSSVSEGKIRQYAENRKDLASLKYIFRKYLSEQEYEDYFHSEKKGCFSNYIGVIQDNRTGKKTLRRCSYDEFKKNTSGILKKIKADECDVDILKELSEKLETESLLPLLISSRNSVIPYQLHKMELEAILANASQYLPFLNEKDESGYSVSEKIVMLLTFRIPYYVGPITNSHSSDEQKKYSWLVRREDGKVYPWNFDQKIDRSASAENFINRMKSHCTYLPDFLVIPRNSLLYSKFMVLNEINKLTINGNQITVKQKQDIFDDLYRRNRKVTSKMIKDYAVSKGWASKPVSLGGIDGEPKASLASYYDFRDIIELKRLEWSKVEEIIEKTTLFGDDRSMCLEAISRIAGEALDKDEISEIAKRRYTGWGRLSREFLVGLQAESSRTGEITSIISLLWNTNSNLMEIINDPEYRITDQLKGQAIDKLDYKLVDELYVSPSVKRQIWQTLKVCQELEKVMKRAPAKVFVEVARGDSENSGRTKSRKQALQELYESIRKEGLFKEEIDELSISLDKYSEQDISRQDKLYLYFTQMGRCMYSGERIDIESLYDTNVYDIDHIFPQSLTADDSLSNRVLTLKRLNLLKSNKVPIPEEWRSRMADYWKILAKKELISKEKYRRLTRSEPLSDDELQGFINRQLVEVSQSTKATIDILRRYYGETTSVVFAKARNVSYFRQRFSIPKARCLNDLHHAKDAYLNIVVGNTYMTKFTSNFWKYISDSRTSSESNISSNIPTWKYNLMKMFDWTVDGAWYPGLTGTIVTVKKECWNDDVRLTKQVSESSGALFDLQLVKGNVAEGLTPAKKITDENISADEWTKRYGGYNKQAVSYFIIAEHKNKKKRDISIFPAYCSMKGNLKTKSEIEQFLIQQHNVEEPRIIIPKLMINDLIEYKGMKMRISGKSSSGILVRMEVPLRCCWFVEDYIHKIEKAFQLKQKNKLSYLPYNRNEISSEYNIMLYDFLTMKAGNPSYINRPSCQCGVLQKGHEKFEGLCIDEQLNVLQNIIRYFSSAPGMNDFSAIGGSANAGQLKFSKTVRTKGAGPKFVVIHQSITGLFEKRTVVK

SEQ ID NO: 1059 - protein, 1389 aa, synthetic construct
  REGION 1..1389: note = MG46-163 effector
MAEVKKQAAKEYYLGLDMGTDSVGWAVTTPDYEVVKKSGKALWGIRLFDAANTAAERRMMRTARRRTHRRAHRIDLLQELFAPEISKVDPGFFARLDESRLWQEDKAVDQPYSLFNDKDFNDISYHKKYPTIYHLRYALMTSDRPFDVRLVYLAIHHIIKHRGHFLFENLKPGEEGSSGFPETFQAFLNEMKEELDIDIDPSKRDSLKSILKDTGITISEKSKKVLSCFGDTRNKSLKAAASLMSGGSASISDLFGDESLKESEAKQVSFSASNYEEKEPVLQGDLGDRFELILVLKGLYDWARLAELMGDSKTISEAKIKVYEKHKKDLKILKKLIRSVSYKDYYKTFKDVGPKSYSCYVGVCKVKGEKKVIPKRCPQDEFYKEITGVIEKADDSEDKAYALHEKETKNFLPLSVERINSHIPYQLHEQELKIILEKAEKYLPFLKEKDQYGTVSSKILQLLTFRLPYYIGPLSENSPNHWFVRKDKEGHIYPWNFSEKVDEAQSAENFIVKMTNTCTYLLGEKVLPKNSLLYTEFMVLNELNNVRAGAAGEKLNPDLKEAAWNELFLKSKKVTQKGLIRFLIRHRWEEKEAKIIQGIDGDFKSSLAPWIDMKKILGDSFDKDLAERIIKDITLFGMDRKMLRKRLENFDVKLTSNQIKELLRLKYSGWGRLSEKFLTGILPVIGKNVEPLVDEATGEVMNIITALRKTNLNLMEILSDAHGFSAAISRENEGKLGETLTYKTVEDLAISPAVKRPVWQSLKIIREICHIMGGSPSRIFIEMARDPNGANEKKRTVSRKDRLLALYKNCKDDTRNWAEEISKYSDSDLRSDRLYLYYTQMGKSMYTGKPIDINSLSDRNIYDIDHIYPQSKTADDSLDNRVLVERSVNGRKSDDYPLSEEVHTRMKPFWDYLLKSGLISKRKYDRLVRNTPLSDDELAAFIGRQLVETRQSTKAVTEILKNIFPDTTIVYAKAGITSRFRQYGNFVKVRDINDFHHAKDAYLNIVVGNVYYTKFTANPLNFIHGDSPRYSLKDEVLYRYPVIRNGKTAWVPGEEGTMAVVRKWMNKNNILFTRMTYMGHGGLFDQKLMKKGKGQVSIKEKGAIANINKYGGYNKATTAYLMYVEGQDAKGKKVYVLENVPLYLKDKLTSIKDKEVYCDKLWNQGKDQKKKITHIKVLIDEIPLQSLISINGFKFHITGRTGTSYSVKSAEELVLDPNDAEILKSVLKFTERFRIATAKAKKDKNSGPLDVALQLTSYDWTKSGRNTELTPEKAAEMREKDLIHLYDVFLNKLTSFYGRAFHAQISVLQNGREKYEGLPPEWKCVVLSEILHLFQCDRVLADLTLIGGSSQAGALKFSKNLKPDNQPMLITQSVTGFFEKKISLAPYRK

SEQ ID NO: 1060 - protein, 1371 aa, synthetic construct
  REGION 1..1371: note = MG46-164 effector
MKNKNDYYIGLDISTHSNGWAVTDENYNIIKRNGKSLWGTRLFDEAKTAKERKTLRAARRRLERRSWRIKLLQELFAQEICKKDPGFYVRMKESGFHKEDKTIHQPNSLFNDINFNDKAYHSAYPTIYHLRYALMTEDKAFDVRLVYLAIHHIMKHRGHFLFANLKTDEKGIALFEESFNAYCNVVERIFGDSLKTDKVENIKDLFKNKDLSKAKKEKALLECLDKVGDKRYKAMVTLAVGGTAQLSTVFNDENLKEKESSTTSVCFAKEDYESKEPEIMDKLGERFDLIAALHDLYNWSLMAQIMKGHKFISEAKIENYDNHKSDLAVLKRVFKQNPEAYAHMFKEPGGKKEKANYSAYVGLCKVKRSKTPITKCSYEEFITELKKRLEQFPSSEDKEYIKQRIKNGEFLRKAVNKENSIIPYQLHLQELKNILTKAERYLPFLKEKDEYGTISDKIISLFTYRIPYYVGPMNEHANHCWIVKKDKNGRVLPWNFNEKIDTENTAEKFIRSLTNKCTYLVGEDVLPKNSLLYTKFTVLNELNSVKIGRNLQKLDEELKAKVLKNLFMVYKHVTKREFVTYLLTEGYNRDEIEPVNGIENGFNSNLGPWIDLKKIMGESFNYKDGEQIIRDITIFGNDKNMLKSRIHRMYPSLSSKQVENLSSLSYQGWGKLSKELLLNVIAEPGEKHEMLVDKATGKALNIISAMEKYPLNFMELLSDRYGYTKAIEEKNKGRWGEGEITYEDVEALHVSPAVRRPLWQAMKIIREIVKIMGREPTRIFIEMTRGDGVNGKATVSRKDKLLELYKKCKDDTRDWVKELGTQENEDFRSDKLYLYYTQMGRSMYTGKPIDINELFNKNMYDIDHIYPQSFTGDDSLDNRVLVEKAVNSKKDAVYPLGDALNGCHIPWQNIHIEDVQKEMKPFWEMLCDKGFISKEKYKRLIRTTPLTNEEKAAFIGRQLVETSQSTKTCAELLSRAYPNTKIVYSKASNVSRFRQYGDFIKVSTMNDFHYAKEAYLNIVVGNVFYTKFTSSPLNFLKEKNSVYTLNTRSLYSRKISRGGVDAWIPPQKDKEGNIIPGHEGTMSTVRKWMSKNNILITRMTFEGKGGLFNQTIMKKGEGKLPLKGKLPLSDMSKYGGYTGVSLAHISLVRAKKGKKTVYMFESVPVYCAKTLKTKEDYVAYFKKVWKEENKDYEDLEILIPIIPLQSLIEVNGFKMHISGKNGNGYSVKNAQELCADNSFVAVLKKALKYNLLEQGEISDEEVLYLYDFFIDKLQNTIYSKKFDGIAKKLSSKRSKFSSLKLKDKCKVLKEVLQLFQCNSSSANLTALGCADRTGLLTIGKNISEKDHVYLIEQSITGFYEKRILLNPYEGK

SEQ ID NO: 1061 - protein, 1720 aa, synthetic construct
  REGION 1..1720: note = MG46-165 effector
MAEVKKQAAKEYYLGLDMGTDSVGWAVTTPDYEVVKKSGKALWGIRLFDAANTAAERRMMRTARRRTHRRAHRIDLLQELFAPEISKVDPGFFARLDESRLWQEDKAVDQPYSLFNDKDFNDISYHKKYPTIYHLRYALMTSDRPFDVRLVYLAIHHIIKHRGHFLFENLKPGEEGSSGFPETFQAFLNEMKEELDIDIDPSKRDSLKSILKDTGITISEKSKKVLSCFGDTRNKSLKAAASLMSGGSASISDLFGDESLKESEAKQVSFSASNYEEKEPVLQGDLGDRFELILVLKGLYDWARLAELMGDSKTISEAKIKVYEKHKKDLKILKKLIRSVSYKDYYKTFKDVGPKSYSCYVGVCKVKGEKKVIPKRCPQDEFYKEITGVIEKADDSEDKAYALHEKETKNFLPLSVERINSHIPYQLHEQELKIILEKAEKYLPFLKEKDQYGTVSSKILQLLTFRLPYYIGPLSENSPNHWFVRKDKEGHIYPWNFSEKVDEAQSAENFIVKMTNTCTYLLGEKVLPKNSLLYTEFMVLNELNNVRAGAAGEKLNPDLKEAAWNELFLKSKKVTQKGLIRFLIRHRWDENEAKIIQGIDGDFKSSLAPWIDMKKILGDSFDKDLAERIIKNITLFGMDRKMLRKRLENFDVKLTSNQIKELLRLKYSGWGRLSKKFLTGILPVIGKNVEPLVDEATGEVMNIITALRKTNLNLMEILSDAHGFSAAISRENEGKLGETLTYKTVEDLAISPAVKRPVWQSLKIIREICHIMGGSPSRIFIEMARDPNGANEKKRTVSRKDRLLALYKNCKDDTRNWAEEISKYSDSDLRSDRLYLYYTQMGKSMYTGKPIDINSLSDRNMAEVKKQAAKEYYLGLDMGTDSVGWAVTTPDYEVVKKSGKALWGIRLFDAANTAAERRMMRTARRRTHRRAHRIDLLQELFAPEISKVDPGFFARLDESRLWQEDKAVDQPYSLFNDKDFNDISYHKKYPTIYHLRYALMTSDRPFDVRLVYLAIHHIIKHRGHFLFENLKPGEEGSSGFPETFQAFLNEMKEELDIDIDPSKRDSLKSILKDTGITISEKSKKVLSCFGDTRNKSLKAAASLMSGGSASISDLFGDESLKESEAKQVSFSASNYEEKEPVLQGDLGDRFELILVLKGLYDWARLAELMGDSKTISEAKIKVYEKHKKDLKILKKLIRSVSYKDYYKTFKDVGPKSYSCYVGVCKVKGEKKVIPKRCPQDEFYKEITGVIEKADDSEDKAYALHEKETKNFLPLSVERINSHIPYQLHEQELKIILEKAEKYLPFLKEKDQYGTVSSKILQLLTFRLPYYIGPLSENSPNHWFVRKDKEGHIYPWNFSEKVDEAQSAENFIVKMTNTCTYLLGEKVLPKNSLLYTEFMVLNELNNVRAGAAGEKLNPDLKEAAWNELFLKSKKVTQKGLIRFLIRHRWDENEAKIIQGIDGDFKSSLAPWIDMKKILGDSFDKDLAERIIKNITLFGMDRKMLRKRLENFDVKLTSNQIKELLRLKYSGWGRLSKKFLTGILPVIGKNVEPLVDEATGEVMNIITALRKTNLNLMEILSDAHGFSAAISRENEGKLGETLTYKTVEDLAISPAVKRPVWQSLKIIREICHIMGGSPSRIFIEMARDPNGANEKKRTVSRKDRLLALYKNCKDDTRNWAEEISKYSDSDLRSDRLYLYYTQMGKSMYTGKPIDINSLSDRN

SEQ ID NO: 1062 - protein, 1347 aa, synthetic construct
  REGION 1..1347: note = MG46-166 effector
MSRDKSKFEKYYLGLDIGTDSVGWCVTDPDYNVLKFNGKAMWGIRLFDEASSAADRRAFRTNRRRLQRRKQRIALVEELLNEEISKVDPLFFIRIKESFFREEDKKEAVRQRYSIFSDAKYTDIDYHREFPTIFHLRHALMLHEQPYDIRLYYLAISHFMKHRGHFLFAGDISEATSFETVYRGLMDYIAENMEDISFSCTDTGKVQRLLTDRTTGRAEKKRIINGLFNEGKNTVQQKEILATLCGATVSLEKLFDDERLKDTEVPKFSFADGIDDDKETKLANALGERFELIVRMKAVYDWAVLTRILSGSKSISQAQVNSYTKHREDLKLLKKLVRKYIPNEYKEVFTDLSVSNNYAAYVGHVSANKKAFKVKRMTEQKDFCDYIRKKFAKVDSNDDELIRMRDELEKGTFMPKQVMKSNSAVPYQIHRQDLRKILDNMGVDYPSLSKKDETGLSSCEKIMKIFEFRIPYYVGPLNGYHSDKGGNSWVIRKRSGRVTPWNFQDMVDTKASAEAFMRRLTNKCTYLIGEDVLPKDSLMYSKYMVLNELNNVRINGNRIDVNTKQRIYKELFRDKSAQLSLNKLQDWLIKENIAEKDDQLSGIDKTFKAKLKSYHDFYKIIGTRVDTEPVMVDDIICNILIFGEDKRLLKERLHEKYGDILTQDEIKMISKLTYSGWGRLSYKFLNEIRAVDRETGELRTIIQAMWDGQENLMELLDSKHGYMDEVSKVNAEVEGRTREISYDLVSESYASPAVKRGIWQTLQVVKEIQKVTGHDPARVFVEVARSKETNPTRKDSRKERLISAYKSIQDETRDWINEINEKEERSFASKKLYLYYTQMGRDMYSGKPIDLDELMTTDTYDIDHIFPQSKTKDDSIINNLVLVRSEYNRDKSDVYPIPSKYRQEELWKMLEKHGLISEEKYARLIRRNGLSDEELAGFIGRQLVETRQTTKVVTQILGQTMPDTKVVYSKANAVSDFRKDNGFIKCRSVNDYHHAKDAYLNIVVGNVYYTKFTDNPMNFIHNANKPGSNEKYSLNHMYDYDVIRGGITAWKRGEDGSISTVRKYMNKNNILFTRYASEKRGGFYDQMLLKKGDGDLLPIKNKDTRYDTSIYGGYKNPSINHFMLVESDGKKGRKRTIEGVPVYLSGASIDRLERFCSQKLGLVNPIIRYLNIKINSLLKIEGYPMHLSGKSNARIVIKNAVQLCIEREQEDLIRRIDKVAERIREDKNYKVDEHDGITDDDMVRIYDTLYEKTKGIYKKRHSSQISILENGRETFVSMTIEDKIKQLLEILHLFQCNAVSSDLSKIGGASRAGVLVVGNEVSKYSDVRLITQSPTGLFEKEIDLLTV

SEQ ID NO: 1063 - protein, 1389 aa, synthetic construct
  REGION 1..1389: note = MG46-167 effector
MAEVKKQAAKEYYLGLDMGTDSVGWAVTTPDYEVVKKSGKALWGIRLFDAANTAAERRMMRTARRRTHRRAHRIDLLQELFAPEISKVDPGFFARLDESRLWQEDKAVDQPYSLFNDKDFNDISYHKKYPTIYHLRHALMTSDRPFDVRLVYLAIHHIIKHRGHFLFENLKPGEEGSSGFPEAFQAFLNEMKEELDIDIDPSKRDSLKSILKDTGITISEKSKKVLSCFGDTRNKSLKAAASLMSGGSASISDLFGDESLKESEAKQVSFSASNYEEKEPVLQGDLGDRFELILALKGLYDWARLAELMGDSKTISEAKIKVYEKHKKDLKILKKLIRSVSYKDYYKTFKDVGPKSYSCYVGVCKVKGEKKVIPKRCPQDEFYKEITGVIEKADDSEDKAYALHEKETKNFLPLSVERINSHIPYQLHEQELKIILEKAEKYLPFLKEKDQYGTVSSKILQLLTFRLPYYIGPLSENSPNHWFVRKDKEDHIYPWNFSEKVDEAQSAENFIVKMTNTCTYLLGEKVLPKNSLLYTEFMVLNELNNVRVGAAGEKLNPDLKEAAWNELFLKSKKVTQKGLIRFLIRHGWEEKEAKIIQGIDGDFKSSLAPWIDMKKILGDSFDKDLAERIIKDITLFGMDRKMLRKRLENFDVKLTSNQIKDLLRLKYSGWGRLSEKFLTGILPVMGKNVEPLVDEATGEVMNIITALRKTNLNLMEILSDAHGFSAAISRENEGKLGETLTYKTVEDLAISPAVKRPVWQSLKIIREICHIMGGSPSRIFIEMARDPNGANEKKRTVSRKDRLLALYKNCKDDTRNWAEEISKYSDSDLRSDRLYLYYTQMGKSMYTGKPIDINSLSERNVYDIDHIYPQSMTADDSLDNRVLVERSVNGRKSDDYPLSEEVHTRMKPFWDYLLKSGLISKRKYDRLVRNTPLSDDELAAFIGRQLVETRQSTKAVTEILKNIFPDTTIVYAKAGITSRFRQYGDFVKVRDINDFHHAKDAYLNIVVGNVYYTKFTANPLNFIHGDSPRYSLKDEVLYRYPVIRNGKTAWVPGEEGTMAVVRKWMNKNNILFTRMTYMGHGGLFDQKLMKKGKGQVSIKEKGAIANINKYGGYNKATTAYLMYVEGQDAKGKKVYVLENVPLYLKDKLTSIKDKEVYCDKLWNQGKDQKKKITHIKVLIDEIPLQSLISINGFKFHITGRTGTSYSVKSAEELVLDPNDAEILKSVLKFTERFRIATAKAKKDKNSGPLDVALQLTSYDWTKSGRNTELTPEKAAEMREKDLIHLYDVFLNKLTSFYGRAFHAQISVLQNGREKYEGLPPEWKCVVLSEILHLFQCDRVLADLTLIGGSSQAGALKFSKNLKPDNQPMLITQSVTGFFEKKISLAPYRK

SEQ ID NO: 1064 - protein, 1348 aa, synthetic construct
  REGION 1..1348: note = MG46-168 effector
MSSKKEKFQNYYLGLDIGTDSVGWCVTDPDYNILKFNGKAMWGIRLFDEATPASERRGFRTNRRRLKRRRQRIALLEELLSDEICKVDPAFYMRIKESFFIEEDKREEVRQKYSIFADSKYTDVEYHREFPTIYHLRCALMRHEHKYDIRLYYLALANFMKHRGHFLITGDVSEATSFEKVYESLTEYIDDNLEDISLSCADIGEVKALLCDKKAGKTEKKRRINELYNDGKNSPQIKEILASLCGAKVSLNVLFNDENLKEADVPKFSFSDGIDDDKDDKEEKLSTELGERYELIVRLKAVYDWSVLTNILEGCDSISDAQVKSYEKHGSDLKLLKQMTRLYIPEEYKEIFTDTSVPSNYAAYVGHTSGKGQTFKVERKVEQRDFCDYIKKKFADVESDDKRLMKMRNDIEKGTFMPKQVMKSNNAVPYQLHRQDLRVIIDNMGLDYPELAVKDESGLSVCDKILKIFEFRIPYYVGPLNGSHSGKGGNSWVIRKAKGRVTPWNFEDMVDTKASVEAFIMRLTNKCTYLTGEDVLPKDSLIYSRYMVLNELNNVRINGSRLDVAIKQRIFDELFKRRATQLSLNKLKDWMIKENIVESEDQISGIDVTFKAKLKSYHDFYRIIGTKVDTDPVMVDGIIKNLLIFGDDRAMLRGIISEKYGDRLSAEEIKKICRLKYTGWGRLSYKLLNEISDVDHETGELKTIIQAMWDGQENLMELLSSEHGYMESIRQINAAAKGYGTDICYDLVHESYASPAVKRGIWQTLLIVREIRKVTGYDPSRVFVEVARSKENDSRRKESRKSRLLALYKNIKDESHDWVKEIDVHEDRDFASKKLYLYYTQMGRDMYSGESIELDELMTDTYDIDHIFPQSRTKDDSIINNLVLVRSKYNRDKSDAYPIPDKYRQESLWKLLESKGLISKEKYARLVRREKLSDEELAGFIGRQLVETRQSTKVVTQILEQTMPDTKIIYSKANVVSDFREENQFIKCRSVNDYHHAKDAYLNIVVGNVYFTKFTNDPLKYIKDSKIHGENERYSLKHMFDYDVKRGNVTAWVAGEDGSIATVRKHMGRNNILFTRYATEKRGGFYDQKLLKKGSGDLVPIKGKDVRYDVEKYGGYNKPGINYFMLVESDGKKGRIRTVEGVPVYLNNASDEELKQFYTAKGLKNPTICYREIKINSLIRIDGYPMHISGKTGTRISIKNAVQLCVSSDMERIIHNIEKTMDKMKENKKYIMNEHDKITDADLVEVYDTLSLKLHTIYAKRQSAQISILEGGREKFLLLSPEDKCRQIAEILHLFQCNTVTSDLSKIGGASNAGDLKVGNKVSRYSEAKIIAQSPTGLFEQEIDLLTI

SEQ ID NO: 1065 - protein, 1393 aa, synthetic construct
  REGION 1..1393: note = MG46-169 effector
MAEVKKQAAKEYYLGLDMGTDSVGWAVTTPDYEGVKKRGKALWGIRLFDAANTAAERRMMRTARRRTHRRAHRIDLLQELFAPEISKVDPGFFARLDESRLWQEDKAVDQPYSLFNDKDFNDISYHKKYPTIYHLRYALMTSDRPFDVRLVYLAIHHIIKHRGHFLFENLKPGEEGSSGFPETFQAFLNEMKEELDIDIDPSKRDSLKSILKDTGITISEKSKKVLSCFGDTRNKSLKAAASLMSGGSASISDLFGDESLKESEAKQVSFSASNYEEKEPVLQGDLGDRFELILVLKGLYDWARLAELMGDSKTISEAKIKVYEKHKKDLKILKKLIRSVSYKDYYKTFKDVGPKSYSCYVGVCKVKGEKKVIPKRCPQDEFYKEITGVIEKADDSEDKAYALHEKETKNFLPLSVERINSHIPYQLHEQELKIILEKAEKYLPFLKEKDQYGTVSSKILQLLTFRLPYYIGPLSENSPNHWFVRKDKEGHIYPWNFSEKVDEAQSAENFIVKMTNTCTYLLGEKVLPKNSLLYTEFMVLNELNNVRAGAAGEKLNPDLKEAAWNELFLKSKKVTQKGLIRFLIRHRWDENEAKIIQGIDGDFKSSLAPWIDMKKILGDSFDKDLAERIIKNITLFGMDRKMLRKRLENFDVKLTSNQIKELLRLKYSGWGRLSKKFLTGILPVIGKNVEPLVDEATGEVMNIITALRKTNLNLMEILSDAHGFSAAISRENEGKLGETLTYKTVEDLAISPAVKRPVWQSLKIIREICHIMGGSPSRIFIEMARDPNGANEKKRTVSRKDRLLALYKNCKDDTRNWAEEISKYSDSDLRSDRLYLYYTQMGKSMYTGKPIDINSLSDRNIYDIDHIYPQSKTADDSLDNRVLVERSVNGRKSDDYPLSEEVHTRMKPFWDYLLKSGLISKRKYDRLVRNTPLSDDELAAFIGRQLVETRQSTKAVTEILKNIFPDTTIVYAKAGITSRFRQYGNFVKVRDINDFHHAKDAYLNIVVGNVYYTKFTANPLNFIHGDSPRYSLKDEVLYRYPVIRNGKTAWVPGEEGTMAVVRKWMNKNNILFTRMTYMGHGGLFDQKLMKKGKGQVSIKGEGAISDINKYGGYNKASTAYLMYVEGEKSNGSPAYVFETVPLYLADKLKTISDKEKYCEELWKNESDKNYKFTHPKVLIGQIPIQSLISLNGFRLCITGRTNNQYVLKSSEELVLSNQNVRILKALLKFVTRLQTAESLVKHSNNKKNESKSEPAIKLTSFDWTEENRIKTISLAEAEKQRNQDMLQLYDVFLDKLSNGIYGKRLGKQADVLSNGRETFVEMIPEEKCKLLAEILHLFQCGRVPANLKPIGGAASAGLHIMNKRLDPKEHPELIVQSVTGFFEKKIPLAPYRK

SEQ ID NO: 1066 - protein, 1342 aa, synthetic construct
  REGION 1..1342: note = MG46-170 effector
MSREKTKYEGYYLGLDIGTDSVGWCVTDPEYNILKFNGKAMWGIRLFDEATQAADRRAYRTSRRRLHRRKQRVALLEELLAEEVCKVDPLFFMRMKESFFREEDKKIDVRQRYSIFSDSNYTDADYHHEFPTIYHLRLALMQHSRKYDIRLYYLALHHFMKHRGHFLLNGDVSEARSFDVVYTSLCDYIEDNMEGLAFDCNNMEDVKNLLCDRKAGKAEKKRQISEMYNGGRNSVQQKEILASLCGASVSLEKLFSDESLKEGEITKFSFADGIDDDKEEKLETVLGERFELIARLKAIYDWTVLSRILEGSDSLSEAQVKSYDKHKNDLCLLKRLVRKYIPKEKNEIFSDLSIPNNYAAYVGHTSVKGKPITARRATEQADFCDYIKKKFSSIDAADPELDRMKEELDKGIFMPKQVMKSNSAVPYQIHRQDLEKIIDNMGKDYPNLAKKNTDGLSICNKILKIFEFRIPYYVGPLNGYHSDKGGNSWVIRRNSGRITPWNFEEMVDTKASAEAFIMRLTNKCTYLTGEDVLPKDSLSYSKYMVLNELNNIRINGVRLNVEIKQRIFDELFKKRNGQMSLKSLKKWMEKENLAEADDQLSGVDETFKAKLKSYHDFYKIIGSRVDTEPVMVESIIRNILIFGEDKRLLKGRIKEKYGDKLSDDEIKQMMKLSYTGWGRFSWKFLNEVNDADNETGEIKTILQAMWDGNENLMELLSSDHGYMDEIRNINASVEGRSEDIRYDLVKETYASPAVKRGIWQTLLIVKEIQKVTGYDPARVFVEVAREKEKNPQRKESRQTRLMALYKNIKDEVRDWQKEIGEHAERDFASKKLYLYYTQMGRDMYSGKQIDLDDLMTDTYDIDHIFPQSKTKDDSILNNLVLVKSEYNRDKSAAYPIPSQYRQESLWKMLRDKELITKEKYERLVRREPLSDEELAGFIGRQLVETRQTTKVVTQILEQTIPDAKIVYSKANNVTEFRKYNGFIKSRSVNDYHHAKDAYLNIVVGNVYYTKFTDNPLRYIRDGKAAEYSLNKVFDFDVSRGETKAWVKGETGTISTVRKYMRKNNILFTRYATEKRGGFYDQMMLKKGSGQLVPIKGKDMRYDTNNYGGYNKPGINYFMLVESDGKKGRKRTLEGVPVYLNGTSDEQLKLFCEEDLGLVNPEIRFREIRINSLLKVDGYPLHVSGKSNARILVKNAVQLCLSQNEEELVHKIDKVLDRIQDNKKYVIDNHDNIDENDLICLYDTLFGKLNKIYKKRHSVQLPVVESGREKFLEMDITAKCKFIREFLHLFQCNAVASDLSGIGGASHAGVLVIGNEISKLSDVRLITQSSTGLFETEIDLLTV

SEQ ID NO: 1067 - protein, 1242 aa, synthetic construct
  REGION 1..1242: note = MG46-171 effector
MTSSEPHDVRLVFLALHHILKHRGHFLTSGEIGELGGNLENSYSQLLSALLDDFSVDLSPNLAEPIKQILINKTIRRSEKLDALVDLMDREEEIIPLLAKLLVGYSVDIQKLFGEQYKGQSPKNVSFSGAGFEDEKQAELQQLLTDPEFSLLQTAFSFYSQVQLDSLLQGYSSFSAAKIGLFDQHKVDLKQLKAIFRANFPADVYTAFFSTSKDNYCNYVAYSGRCVQNGKKQPVVYRCLKDKFYEELKKQLAKLPQTARDSSELSAIMLKIENETYLPKPVSKDNSLVPNQIQLSELHQILKNASVYLPFLTRQGEEGLTISEMIEKIASFRIPYYVGPLNPAHRIIPGKPDGSRHAWLTKTHPEPIRPWNFERVVDQEQSATDFINNLTNKCTYLIGEDVLSKDSPTYAKFTLLNMLNVLSINGERLPVLVKQQIYQDLFLHPKNTSRVTKKALLNYLNTEGYPVTESELVGMDLDIPITLKAERQLEALAPGKLTLEDKEEIVRLITIFPESGSMLQNRLSRQFGSKLTESELKTIGKLKFSNWGQFSWKFLTGLVARGPEGKETTIIEAMWNYNLNLMELLSQEYGFSAAIEEYKQTMLGEQTGLSYALVDQYPTSPAVKKMIWQALKVVDEIVKIRKEPPEKVFIEVAREEGEKKRTTSRLDQVKQIFKANKDIEEHLKQELDTQTEETLRRKKLYLYFTQLGRCMYTGKAIDLEKLDAKDAANNEFYDIDHIYPRSLTKDDSLLNNLVLVESSANREKGDKFPISTGIQTARRSWWAVLKDKNLISEEKFRRLVRTTELTPEELESFISRQLVQTRQATKAAAEILKSALPESRIVFVKAGHVSDFRYQQNGFQFPKVRGMNDLHHAKDAYLNIVVGNVFDTKFTQNVRIFLKDHPKGGYNLARMYDFNVIGRSGEIAWQAGESGTIQTVKTIMASNIIQCTWQTHHQTSGQNGGLFDQNLMPKGKGQFPIKTSDPRLAGEDGINKYGGYNKPTGTTFFVVEHTKSRKRQRSILPLNLSWVLTHEQNPQELEAYCKEDLALVEPRVILTDLPYNAILEINGFPMRLLAKTGSSLKVATALQPYFPVEFEPLLKALARQPEEDKEAEAKPRGAFTPEDFLALYDHFTNKLGNEPYSRFSAFTNQHRNLSGSRENFIRLTPFEQTKVLGQILTLFLCDGRTSDLSLLQPKNPDGSPSTKNKQSGMLLISQNLQQGVQVIVRNYSCTGLFLSKTPLSLP

SEQ ID NO: 1068 - protein, 1363 aa, synthetic construct
  REGION 1..1363: note = MG46-172 effector
MSIMKEINEYYLGLDMGEGSLGWAVTTPDYHVVKKAGKALWGVRLFESAKTAKERRVFRTGRRRIERRNRRIDFLQELFSEAVCEKDPGFYQRLNDSRLWEEDKTERQINSLFNDVDFTDKSYHKKFPTIYHLRQKLMEDSCEFDVRLVYLAIHHILKHRGHFLLENFEIREDGAVGFEEAMADLGNVLGQFLDRSLPVENNDACKEILKNRKLNKLEKLEQLGKLYDAGGDKSIKEIFRLIVGGTAHLAVIFCDETLKNTERGKISFEDAQYEEYKNDVQTILDDRFDVVAACETLHNWAILAELMGNYKYISDAKVAIFNEHRKDLTVLKRLLKRDSNVYTKMFRMAGKNSYSAYVGLCKIHGKKVPIEKACTQGDFAGEIKKIIKNFPDSEDKKYILDKIERNELLPKAVSKQNGVIPYQLHLVELNKILSNAERYLPFLKKEDEYGTVSDKIRKLFTFRIPYYVGPLNGHSPFAWAVRKDENGHIYPWNFERKIDIEASAEEFIRRMTNKCTYLVKKDVLPKNSLLYTEFMVLNELNNVRIGSAQEKLPPGMKARVWERLFLKDKKITAKKMCSYLIREEHISKEEAAQISGIERDFKASLAPWIDMRKILGDNFTVSDSEKIIKDITLFGADKKMLRRRLKARFGYLEDCQVKELVRLPYQGWGRLSKEFLTQILPKAERDSTVLVDQETGEVMNIITALKKTDHNLMELLSGKFGYSAALSEVNTTSVSVCDKAISYKNIQDMRISPAVKRPLWQTLRVIKEIIHIMGKAPSRIFIEMARAEDEKKWKTVSRKDRLLDLYKKCKDEIRNWSADIKKLGEEIKELSDGQLRSDKLYLYYTQMGRSMYTGKPICLGSLMAGADYDIDHIYPRSATGDDSLDNRVLVERTENAKKGDHYPLSIEIQGGRAVFWKVLLDKGFISKEKYRRLTRKTLLTDDEKAGFIGRQLVETRQSTKAIAEILKKAFPETKIIYTKARNVSRFRQYAEFVKVRDMNDYHHAKDAYLNIVVGNAFYTKFTSNPIHFLSERNAVYSLNERTFYQFPIQRGSTMAWEPGDSGTMAVVRKWMDKNNILYTRMPFEEKGGLFDQNILKKGKGQVSLRARGALSDIQKYGGYNNATASYFMLVKAEKNGKTIYLLETVPLHLSGRLESIEDKINFCRELWHRDRKDYKNPVICIPKIYKQSLFEVDGFREHISAKTGNQFVMRNAEQLCLNAESAQIIKNVLKFNQRKQVQKELKVTVHDKITEENLINIFETFISKIQTSIYRNKFEASVGLMIKGKGTFIELSMEDKCKCIGEILHLFQCNPVLSDLQLIGGKKASGRIYMGKRFDGNKKVFLVLQSVTGFFEKKILLAPYEKK

SEQ ID NO: 1069 - protein, 1341 aa, synthetic construct
  REGION 1..1341: note = MG46-173 effector
MIKNSEYFIGLDVGTNSVGWAVTDENYNILKVKGKNAIGTHLFEEGKTAETRRVFRTAQRRKDRKRNRILLLNELFDSEICQIDVNFFPRLADSYFWAEDKKINQKNTIFNDAQYKDKDYHKEYPTVYHLRYELMTNKEKKFDIRLIYLAIAHILKNRGHFLFAGQDFNIENSFAELFKTFVSQMHSQLEIEIAENLADNIAKILREAITNTDKNKKLTSLLGKTNKQQAEIIKLLLGNKAILATIFNDDNFNETELKEIQFSKADYLDNEPKYAALLGEKMELITAVKAIYDWSVLSNILKGNTSISQAKIASYDQHKADLKILKQLLKQSLDKDNFSSFFANTTSEKNYCAYIGNSIAKNNSSVCSKEDFYKEIQNLLKPLADSESKTYILNQIALDEFLPKQKTADNGVIPYQLHLKELVQILENAAKHYDFLNSKEAELTISDKIIAIMKFRIPYYVGPLNNYHKIHSWIVKKSAEKVYPWNFEKVVDLANSGEEFIKRMTNRCTYLIGADVLPINSLLYSKFTVLNIINKLKVNDVQIDVDTKQKIYNKLCFTKANITIKDIKNFLLSECQINKNDTLSGIDADLKLSLKPYLDFFRILTEQLFDEEKIEASIKTIVLFGGEKKIIKQRIQAIWGNLISPEQLSAICRLNYSGWGRLSKEFLTEVYHVDPVSNNKFNIIEALYATNNNLMQLLSPQLSYIKNIEERNLEINGVITKFSYETLVKPLYCSPAVKRGIWRTLNIVRELEKVLGKPPKKVFIETTRANDVKGDLGRKSSRQKQLLAIYTKNSLDKDLLTSLKGYAERDLRIKKIYLYYTQLGRCMYSGKIINLADLLNKNLYDIDHIYPRSKTKDDSMDNLVLVDKNLNRSKTDVYPIETNLISAEALALWQRLGKIGLISNEKYKRLTRKEPFSNAELAGFINRQLVETSQSSKAVAEVLKQIFSEDQTEIVYVKSGNVSDFRKNTINRLKVREINDYHHAFDAYLNIVVGNVYNVKFTKNPLNFIDNAEYRSYSLKRIFDFDVKRGKQIAWLRGKEGTIQTVNKMLDTTRLQYTRYPRTVTGEFYKQMPLKKGSGEIPLKSADPRYQDKERYGGYTSDSGAYFILVKHLLKGKEARTIEYVPVRYAKKFELDKTLLLKYCLDKAPYGLELKSPKILIDKIKIDTLFNIDGFPMHISGRTGNYITFKPAVQLILDKESEQYLKKVTSFVERLKTDKDLKINAQYDKITAAENLKLYDLLLEKNNNKIYALRPASQIKVLQEGREKFNLLSLEQQCQLILQILLLTKCAFVRADLKLLGGAGQAGTVKKNKNISDYQKAKIINESPTGFYSQEIDLLKL

SEQ ID NO: 1070 - protein, 990 aa, synthetic construct
  REGION 1..990: note = MG46-174 effector
MYTRGFCRGNKKIIKNFPDSEDKKYILDKIERNELLPKAVSKQNGVIPYQLHLVELNKILSNAERYLPFLKKEDEYGTVSDKIRKLFTFRIPYYVGPLNGHSPFAWAVRKDENGHIYPWNFERKIDIEASAEEFIRRMTNKCTYFVKKDVLPKNSLLYTEFMVLNELNNVRIGSAQEKLPPGMKARVWERLFLKDKKITAKKMCSYLIREEHICKEEAAQISGIERDFKASLAPWIDMRKILGDNFTVSDSEKIIKDITLFGADKKMLRRRLKARFGYLEDCQVKELVRLPYQGWGRLSKEFLTQILPKAERDSTVLVDQETGEVMNIITALKKTDHNLMELLSGKFGYSAALSEVNTTSVSVCDKAISYKNIQDMRISPAVKRPLWQTLRVIKEIIHIMGKAPSRIFIEMARAEDEKKWKTVSRKDRLLDLYKKCKDEIRNWSADIKKLGEEIKELSDGQLRSDKLYLYYTQMGRSMYTGKPICLGSLMAGADYDIDHIYPRSATGDDSLDNRVLVERTENAKKGDHYPLSIEIQGGRAVFWKVLLDKGFISKEKYRRLTRKTLLTDDEKAGFIGRQLVETRQSTKAIAEILKKAFPETKIIYTKARNVSRFRQYAEFVKVRDMNDYHHAKDAYLNIVVGNAFYTKFTSNPIHFLSEKNAVYSLNERTFYQFPIQRGSTMAWEPGDSGTMAVVRKWMDKNNILYTRMPFEEKGGLFDQNILKKGKGQVSLRARGALSDIQKYGGYNNATASYFMLVKAEKNGKTIYLLETVPLHLSGRLESIEDKINFCRELWHRDRKDYKNPVICIPKIYKQSLFEVDGFREHISAKTGNQFVMRNAEQLCLNAESAQIIKNVLKFNQRKQVQKELKVTVHDKITEENLINIFETFISKIQTSIYRNKFEASVGLMIKGKGTFIELSMEDKCKCIGEILHLFQCNPVLSDLQLIGGKKASGRIYMGKRFDGNKKVFLVLQSVTGFFEKKILLAPYEKK

SEQ ID NO: 1071 - protein, 1368 aa, synthetic construct
  REGION 1..1368: note = MG46-175 effector
MKYYIGLDMGTNSVGYAVADEEYKLLKAHQKPMIGVRLFDEAQTAAKRRLARVNRRRMERRRQRLALLEDLFSPVISKVDPGFFQRLKESFFMVAHKTEEQPNTLFNDPDFTDRNYHKKYPTIYHLRHELMTSQQPHDVRLVFLAIHHILKHRGHFLNPGELGELGGQLQSCYSQFLVSLSEDFAIELPPDIADQIQAVLTDKTTRRSEKQELLKQLFAVDDDMVAQLSKLFAGLSANISKLFGEQYKEQSPKDVSFSGAGFEDEKQIELQQILTDSEFSLLQSAFNLYAQIQLDSLLQGYPSFSASKIGLYEKHKSDLKRLKKLLKTNLESKAYTAYFSESKKDFCNYVAYSGHCLKNKKKQPVAYRCQKTAFYEELKKILAKLPESIRDGEEVKSIQLEIENETFLPKQVSKDNSLIPNQLQLSELRQILKNAATYLPFLNRQGEDGLTISEMIEKIADFRIPYYVGPVNPAHRVIPGKPNGSRHAWVTKISAEPVRPWNFERVIDLEQSATDFINNLTNKCTYLIGEDVLSKDSPTYARFMLLNILNLLSVNGQRLPVLVKQNIYNDLFLHPKTSGKVTKKKICAYLNAEGYPVTEAELGGMDLEIPISLKAERQLEALAPGKLSLEDKEEIVRLITVFPESNRMLRNRFSRQFGNKLTQSELTAISKLKFAKWGQLSRKFLTGLRANGPDGRETTILEAMWDYNLNLMELLSQDYGFADAVKQYKQDMLGDQQNFSYSLVDQYPTSPAVKKMIWQTMKIVDEIIRIRKQAPEKIFIEVAREEGEKKRTTSRLDQIKQIFKANKDIEDRLKKELDTKSEENLRRKKLYLYFTQLGRCIYTGKAIDLEKLDAKDSANNDFYDIDHIYPRSQTKDDSLMNNLVLVESSANRQKGDDFPIVPGIQAAQKGWWTALKDKKLISEEKYRRLVRTTPLSPEELESFISRQLVQTRQATKAVAELLKLVFPESRVVFVKAGHVSDFRYEQNAFRFPKVRGMNDLHHAKDAYLNIVVGNVFDTKFTQDVRNYIKNHPKRDFNLGRMYDFDVVGASGKLAWKTGEEGSIRMVRSMMALNAIQCTWQTSGQNGGLFDQNLLPKGKGQFPIKTSNPHLAGQEGINNYGGYNKPTGATFFVVEHELRKKAQRTILPLDLTWVLTHEQTAPELEAYCRETLGLIEPRVILADLPYNSILEVNGFPLRLLAKTGASLKLAPALQPYFPTAYEPILKALTRQAEEGKDAEADPRAVYPPEENLALYDHFTQKLGSEPYSRLSVFVNQYRNLSASRGNFILLTPFEQMKVLGQILILFLCDGRTSDLSLLQPKNPNGTPSSKNKQSGMVTISQNLQKGIKVDVLNFSCTGLFLSRTPLSQP

SEQ ID NO: 1072 - protein, 1363 aa, synthetic construct
  REGION 1..1363: note = MG46-176 effector
MSIMKEINEYYLGLDMGEGSLGWAVTTPDYHVVKKAGKALWGVRLFESAKTAKERRVFRTGRRRIERRNRRIDFLQELFSEAVCEKDPGFYQRLNDSRLWEEDKTERQINSLFNDVDFTDKSYHKKFPTIYHLRQKLMEDSCEFDVRLVYLAIHHILKHRGHFLLENFEIREDGAVGFEEAMADLGNVLGQFLDRSLPVENNDACKEILKNRKLNKLEKLEQLGKLYDAGGDKSIKEIFRLIVGGTAHLAVIFCDETLKNTERGKISFEDAQYEEYKNDVQTILDDRFDVVAACETLHNWAILAELMGNYKYISDAKVAIFNEHRKDLTVLKRLLKRDSNVYTKMFRMAGKNSYSAYVGLCKIHGKKVPIEKACTQGDFAGEIKKIIKNFPDSEDKKYILDKIERNELLPKAVSKQNGVIPYQLHLVELNKILSNAERYLPFLKKEDEYGTVSDKIRKLFTFRIPYYVGPLNGHSPFAWAVRKDENGHIYPWNFERKIDIEASAEEFIRRMTNKCTYFVKKDVLPKNSLLYTEFMVLNELNNVRIGSAQEKLPPGMKARVWERLFLKDKKITAKKMCSYLIREEHISKEEAAQISGIERDFKASLAPWIDMRKILGDNFTVSDSEKIIKDITLFGADKKMLRRRLKARFGYLEDCQVKELVRLPYQGWGRLSKEFLTQILPKAERDSTVLVDQETGEVMNIITALKKTDHNLMELLSGKFGYSAALSEVNTTSVSVCDKAISYKNIQDMRISPAVKRPLWQTLRVIKEIIHIMGKAPSRIFIEMARAEDEKKWKTVSRKDRLLDLYKKCKDEIRNWSADIKKLGEEIKELSDGQLRSDKLYLYYTQMGRSMYTGKPICLGSLMAGADYDIDHIYPRSATGDDSLDNRVLVERTENAKKGDHYPLSIEIQGGRAVFWKVLLDKGFISKEKYRRLTRKTLLTDDEKAGFIGRQLVETRQSTKAIAEILKKAFPETKIIYTKARNVSRFRQYAEFVKVRDMNDYHHAKDAYLNIVVGNAFYTKFTSNPIHFLSERNAVYSLNERTFYQFPIQRGSTMAWEPGDSGTMAVVRKWMDKNNILYTRMPFEEKGGLFDQNILKKGKGQVSLRARGALSDIQKYGGYNNATASYFMLVKAEKNGKIIYLLETVPLHLSGRLESIEDKINFCRELWHRDRKDYKNPVICIPKIYKQSLFEVDGFREHISAKTGNQFVMRNAEQLCLNAESAQIIKNVLKFNQRKQVQKELKITVHDKITEENLINIFETFISKIQTSIYRNKFEASVGLMIKGKGTFIELSMEDKCKCIGEILHLFQCNPVLSDLQLIGGKKASGRIYMGKRFDGNKKVFLVLQSVTGFFEKKILLAPYEKK

SEQ ID NO: 1073 - protein, 1368 aa, synthetic construct
  REGION 1..1368: note = MG46-177 effector
MKYYIGLDMGTNSVGYAVADEEYKLLKAHQKPMIGVRLFDEAQTAAKRRLARVNRRRMERRRQRLALLEDLFSPVISKVDPGFFQRLKESFFMVAHKTEEQPNTLFNDPDFTDRNYHKKYPTIYHLRHELMTSQQPHDVRLVFLAIHHILKHRGHFLNPGELGELGGQLQSCYSQFLVSLSEDFAIELPPDIADQIQAVLTDKTTRRSEKQELLKQLFAVDDDMVAQLSRLFAGLSANISKLFGEQYKEQSPKDVSFSGAGFEDEKQIELQQILTDSEFSLLQSAFNLYAQIQLDSLLQGYPSFSASKIGLYEKHKSDLKRLKKLLKTNLESKAYTAYFSESKKDFCNYVAYSGHCLKNKKKQPVAYRCQKTAFYEELKKILAKLPESIRDGEEVKSIQLEIENETFLPKQVSKDNSLIPNQLQLSELRQILKNAATYLPFLNRQGEDGLTISEMIEKIADFRIPYYVGPVNPAHRVIPGKPNGSRHAWVTKISAEPVRPWNFERVIDLEQSATDFINNLTNKCTYLIGEDVLSKDSPTYARFMLLNILNLLSVNGQRLPVLVKQNIYNDLFLHPKTSGKVTKKKICAYLNAEGYPVTEAELGGMDLEIPISLKAERQLEALAPGKLSLEDKEEIVRLITVFPESNRMLRNRFSRQFGNKLTQSELTAISKLKFAKWGQLSRKFLTGLRANGPDGRETTILEAMWDYNLNLMELLSQDYGFADAVKQYKQDMLGDQQNFSYSLVDQYPTSPAVKKMIWQTMKIVDEIIRIRKQAPEKIFIEVAREEGEKKRTTSRLDQIKQIFKANKDIEDRLKKELDTKSEENLRRKKLYLYFTQLGRCIYTGKAIDLEKLDAKDSANNDFYDIDHIYPRSQTKDDSLMNNLVLVESSANRQKGDDFPIVPGIQAAQKGWWTALKDKKLISEEKYRRLVRTTPLSPEELESFISRQLVQTRQATKAVAELLKLVFPESRVVFVKAGHVSDFRYEQNAFRFPKVRGMNDLHHAKDAYLNIVVGNVFDTKFTQDVRNYIKNHPKRDFNLGRMYDFDVVGASGKLAWKTGEEGSIRMVRSMMALNAIQCTWQTSGQNGGLFDQNLLPKGKGQFPIKTSNPHLAGQEGINNYGGYNKPTGATFFVVEHELRKKAQRTILPLDLTWVLTHEQTAPELEAYCRETLGLIEPRVILADLPYNSILEVNGFPLRLLAKTGASLKLAPALQPYFPTAYEPILKALTRQAEEGKDAEADPRAVYPPEENLALYDHFTQKLGSEPYSRLSVFVNQYRNLSASRGNFILLTPFEQMKVLGQILILFLCDGRTSDLSLLQPKNPNGTPSSKNKQSGMVTISQNLQKGIKVDVLNFSCTGLFLSRTPLSQP

SEQ ID NO: 1074 - protein, 1372 aa, synthetic construct
  REGION 1..1372: note = MG46-178 effector
MKYYIGLDMGTNSVGYAVADEEYKLLKAHQKPMIGVRLFDEAQTAAKRRLARVNRRRMERRRQRLALLEDLFSPVISKVDPGFFQRLKESFFMVAHKTEEQPNTLFNDPDFTDRNYHKKYPTIYHLRHELMTSQQPHDVRLVFLAIHHILKHRGHFLNPGELGELGGQLQSCYSQFLVSLSEDFAIELPPDIADQIQAVLTDKTTRRSEKQELLKQLFAVDDDMVAQLSRLFAGLSANISKLFGEQYKEQSPKDVSFSGAGFENEKQIELQQILTDSEFSLLQSAFNLYAQIQLDSLLQGYPSFSASKIGLYEKHKSDLKRLKKLLKTNLESKAYTAYFSESKKDFCNYVAYSGHCLKNKKKQPVAYRCQKTAFYEELKKILAKLPESIRDGEEVKSIQLEIENETFLPKQVSKDNSLIPNQLQLSELRQILKNAATYLPFLNRQGEDGLTISEMIEKIADFRIPYYVGPVNPAHRVIPGKPNGSRHAWVTKISAEPVRPWNFERVIDLEQSATDFINNLTNKCTYLIGEDVLSKDSPTYARFMLLNILNLLSVNGQRLPVLVKQNIYNDLFLHPKTSGKVTKKKICAYLNAEGYPVTEAELGGMDLEIPISLKAERQLEALAPGKLSLEDKEEIVRLITVFPESNRMLRNRFSRQFGNKLTQSELTAISKLKFAKWGQLSRKFLTGLRANGPDGRETTILEAMWDYNLNLMELLSQDYGFADAVKQYKQDMLGDQQNFSYSLVDQYPTSPAVKKMIWQTMKIVDEIIRIRKQAPEKIFIEVAREEGEKKRTTSRLDQIKQIFKANKDIEDRLKKELDTKSEENLRRKKLYLYFTQLGRCIYTGKAIDLEKLDAKDSANNDFYDIDHIYPRSQTKDDSLMNNLVLVESSANRQKGDDFPIVPGIQAAQKGWWTALKDKKLISEEKYRRLVRTTPLSPEELESFISRQLVQTRQATKAVAELLKLVFPESRVVFVKAGHVSDFRYEQNAFRFPKVRGMNDLHHAKDAYLNIVVGNVFDTKFTQDVRNYIKNHPKRDFNLGRMYDFDVVGASGKLAWKTGEEGSIRMVRSMMALNAIQCTWQTRHQTSGQNGGLFDQNLLPKGKGQFPIKTSNPHLAGQEGINNYGGYNKPTGATFFVVEHELRKKAQRTILPLDLTWVLTHEQTAPELEAYCRETLGLIEPRVILADLPYNSILEVNGFPLRLLAKTGASLKLAPALQPYFPTAYEPILKALTRQAEEGKDAEADPRAVYPPEENLALYDHFTQKLGSEPYSRLSVFVNQYRNLSASRGNFILLTPFEQMKVLGQILILFLCDGRTSDLSLLQPKNPNGTPSSKNKQSGMVTISQNLQKGIKVDVLNFSCTGLFLSRTPLSQP

SEQ ID NO: 1075 - protein, 1372 aa, synthetic construct
  REGION 1..1372: note = MG46-179 effector
MKYYIGLDMGTNSVGYAVADEEYKLLKAHQKPMIGVRLFDEAQTAAKRRLARVNRRRMERRRQRLALLEDLFSPVISKVDPGFFQRLKESFFMVAHKTEEQPNTLFNDPDFTDRNYHKKYPTIYHLRHELMTSQQPHDVRLVFLAIHHILKHRGHFLNPGELGELGGQLQSCYSQFLVSLSEDFAIELPPDIADQIQAVLTDKTTRRSEKQELLKQLFAVDDDMVAQLSKLFAGLSANISKLFGEQYKEQSPKDVSFSGAGFEDEKQIELQQILTDSEFSLLQSAFNLYAQIQLDSLLQGYPSFSASKIGLYEKHKSDLKRLKKLLKTNLESKAYTAYFSESKKDFCNYVAYSGHCLKNKKKQPVAYRCQKTAFYEELKKILAKLPESIRDGEEVKSIQLEIENETFLPKQVSKDNSLIPNQLQLSELRQILKNAATYLPFLNRQGEDGLTISEMIEKIADFRIPYYVGPVNPAHRVIPGKPNGSRHAWVTKISAEPVRPWNFERVIDLEQSATDFINNLTNKCTYLIGEDVLSKDSPTYARFMLLNILNLLSVNGQRLPVLVKQNIYNDLFLHPKTSGKVTKKKICAYLNAEGYPVTEAELGGMDLEIPISLKAERQLEALAPGKLSLEDKEEIVRLITVFPESNRMLRNRFSRQFGNKLTQSELTAISKLKFAKWGQLSRKFLTGLRANGPDGRETTILEAMWDYNLNLMELLSQDYGFADAVKQYKQDMLGDQQNFSYSLVDQYPTSPAVKKMIWQTMKIVDEIIRIRKQAPEKIFIEVAREEGEKKRTTSRLDQIKQIFKANKDIEDRLKKELDTKSEENLRRKKLYLYFTQLGRCIYTGKAIDLEKLDAKDSANNDFYDIDHIYPRSQTKDDSLMNNLVLVESSANRQKGDDFPIVPGIQAAQKGWWTALKDKKLISEEKYRRLVRTTPLSPEELESFISRQLVQTRQATKAVAELLKLVFPESRVVFVKAGHVSDFRYEQNAFRFPKVRGMNDLHHAKDAYLNIVVGNVFDTKFTQDVRNYIKNHPKRDFNLGRMYDFDVVGASGKLAWKTGEEGSIRMVRSMMALNAIQCTWQTRHQTSGQNGGLFDQNLLPKGKGQFPIKTSNPHLAGQEGINNYGGYNKPTGATFFVVEHELRKKAQRTILPLDLTWVLTHEQTAPELEAYCRETLGLIEPRVILADLPYNSILEVNGFPLRLLAKTGASLKLAPALQPYFPTAYEPILKALTRQAEEGKDAEADPRAVYPPEENLALYDHFTQKLGSEPYSRLSVFVNQYRNLSASRGNFILLTPFEQMKVLGQILILFLCDGRTSDLSLLQPKNPNGTPSSKNKQSGMVTISQNLQKGIKVDVLNFSCTGLFLSRTPLSQP

SEQ ID NO: 1076 - protein, 1399 aa, synthetic construct
  REGION 1..1399: note = MG46-180 effector
MEITGHGTKGASDYYIGLDIGTASVGWAVTDPSYELVKKHRKNLWGVRLFDTANTAEERRLHRSARRRHQRKLQRLRILREIFDRSIAEVDPQFFTRLRESLYHADDRSGSFISTLFDDDSFKDSDYHKKFPTIFHLRSHLLHHPDEKPDIRMLYLAIHSILKNRGHFLIPGETLDTTSSLYALVDNLQRETSAALGCTLEFSCPPEDLGMILKMRRKSERKSKLTEISTLTRITGDQVEENPKRQATELIKALAGTPFMLSALFSEEAYQDHENNKIEFDTEGYEESKDAIEVLLEPEEFALIEAIEGLRSWALLSDILHGEAYISDAKTISYAEHKEDLKKLKRLVKAYVAESFIAAFKDPAESNNYAHYVGTGNKSGVKVQVIHKSKCSQDDVNKYFEGLLKPFKNNEDDLLVEMLGKLEVRSALPKQRVRDNRVIPHQLHKKELEVILAHAKRYYPFLSVPDADGYSAIDKIMGMMTFRIPYYVGPLNTAHLRDEGKEGFCWMVRQQGKEQAPILPWNWEDVVDKNASAEKFISRMTNACTYLFDQKVLPKYSLLYNRFMVLNELNNLKVNGEPVTVELKQRLYTELFLESGKKKITEKMLKKFLLTNNIINRGDEVLIEGIDQGFTNSLKSHIDFSHYLNEKILTVEEVEQIIEWKAFYVDDTSILREKITEELGRKLSEEQISDIVQIIRSYKGWGRLSRVFLEEVYHEIPATGEVRSIIQMMWETNNNLMKLLSSEFDFLDETQRINNEKLLQTSFSYDTLVKPLAVSPPVKRQIWQTLLIVRELRKVMGKAPRRVFVEMARERGEKVRTTSRKQTLVKLYENCKNDIGFNKALLETLEEKTDAELRNDRLYFYYTQMGRCPYCGGRIEIEQMHNPQLYDIDHIYPQSLIKDDSLNNRVLSHKTCNGNKGGDYPINPIWQEKMHGFWKMLLTRELISAEKFKRLTRTTSLSDDELFAFINRQLVETRQSTKVVSTILKNLFQDDDTEIIYVKARNVSNFRTDFEIKKSRLVNDHHHAHDAYLNIVVGNTYHTRFTDDPRVFIKELRRTNQNYNASNLFTKNVERNGKIAWIADEEYWRNRGRKKREKRETGTILTIRETLRNHQVLITRQSVEASGALFKLQPLRKKQNLIPLKGSDPKLYETTKYGGYNAASTAYFALVEHIVKKKPVRSLVPIPIQYAQQFKLDSTKLVGHCTEHLHYDSPNLVLERILLHEMVCVQNFFMSLSGITGSRVVANNEVQLVLSEQYYDYFSQVEKYLSLLKKVKASEVLENAEILAEDLEITREANLALYDLLLAKERDSIYRNRPANQAKLLTTKQSLFTTLDIKTQCEVLVQILNLFTCTPESADLKVIGGGGRTGIVLFQSQIKDTNAQLIHRSPTGIFSKSVRVYDL

SEQ ID NO: 1077 - protein, 1109 aa, synthetic construct
  REGION 1..1109: note = MG46-181 effector
MQKQNYYLGLDVGTNSIGYAVTDEYYHLLKFKGEPMWGSHVFEDGKQCAERRGFRTGRRRLDRRQQRVRLVQEIFAKEVAAVDERFFIRLKESALYREDREKKESHTLFCDADYTDLRFFKEYPTIHHLIVSLMEDEKPHDIRQVYLAVAWLVSHRGHFLSEVDKENVDKVLDFDEVYNRFLACYRESVDRENSGEMSWACGNMQEFQRILLMKKGIKEKEKAFQRLLLEGKKRKEDEDTVISINATLKLLAGGTVSVKELFCQKEYEEKISVSLRKSQEEFEALLAELDEEAEFLACLRNLYDWSILYEASGGDVCISKTKVQVYEQHEKDLQGLKNFVRKYLSDKYEEIFRRAEGGLFNYVSYSYNTSSVAHIEEKFRKCNKEEFCIYLKKQVRDVSCDEEDKVFYEDMMERLEHWSFMPKQVDGDNRVIPYQLYYHELKLILQKAECYLPFLKEKDAEGYTNKDKLLAIMEYRIPYYVGPLHPGNGANHWIVRRADATGPIRPWNFETKVDLDACEADFIKRMTNTCTYLPGESVMPKHALLYCKYQVLNLINNIKINGASISVECKQGIYGLFEEKRNVSERRIRDYLISNNYMEKTDEMSGLDIELKASLKSYHDFKRLLSTGALCESDVEKIIERITYSEERVRVKKWLDKEFSFLTEDDRKYISRLKYKDFGRLSVKFLTGLKGVDRETGKDKSIIRIMWDTNDNLMQILFSDRYHFQELLQEAQQDYYREHPANTEKLLKDMWVSNAVKRPIYRTLDIVRDVKKACGAAPEKIFIEMARGGGVKGQRTDSRRKQIEKLYQVCNRKEVQELSKELDGKSDNELQSEVLFLYFMQLGRCMYSGDPIDIHRLKIDTYVNIDHIYPQAYVKDDSLDNKVLVFSKLNGTKGNRYPIDAGLPGTCSRMMDIWKKYRDCGLISKEKYNRLVRNTPFSDEEKMNFINRQLVETRQSTKALAELLKGMFPTTKIIYVKAGLSSDFRKEYGIKKSRQINDLHHAKDAYLNIVCGNVYHSKFTDRFFKLSDNYSIKTKTIFGQELRIGNNVVWQGEASIAEIKHILAKNNIHYTRYAFCRRGGLFDQQPKRKGEGLVPRKARLDSDKYGGYQ

SEQ ID NO: 1078 - protein, 1363 aa, synthetic construct
  REGION 1..1363: note = MG46-182 effector
MGYYLGLDVGTNSVGYAATDEQYHLRKFHGKPMWGSHVFEEANPASERRAFRTARHRLNRRQQRVQLVQDIFAQEIAKVDPRFFIRLQESRLHREDVEAGDRNVLFNDPAYTDKEYYAKYPTIHHLLLELMRSDASHDVRLVYLAVAWLVAHRGHFLSEVDKDNVEAVLRFDEVYQDFQDVMGIYGLDPWTCDKEKLQSVLLQRKRIKEQQKDLETLIYPGQKLKTSEDDLVDKKLLLNLLAGGTVPLEKLFPQLTLEENKKLCFQDLEDAVAEALQLLDEEADLVIQLRRLYDWALLKHSLQGSLSVSEAKVRVYEQHREDLTDLKGFVRRCAPKHYNRIFRTMDGKDTLANYVAYSYELSNVKGRILPKKKATQAEFCDFLKKELATVSCSGEDKKLYEAMKARWETHTFLPKQVNGDNRIIPYQLYYHELKTILQKAERYLPFLSAKDSDGLTAMKKLLSIMTFRIPYFVGPLCKAHSDNAWIERKAEGKIYPWNFDRMVDLDASEAAFIRKMTNMCTYLPDQPVLPMQSLLYERFMVLNEINNLKVNGVPISVEAKQDIYQLFTQKRKVTRKAMEAFLLSNGWIERGDVVSGVDVTVKSALTSQHDFQSLLERKILTQDEVERIIEHLTYTADQKRSWKWLQEQFPQLEMQDIKYVAKLKYEEFGRFSREFLVGLLGVNKETGEQNSIIGFLWETNDNLMQLLSNRYTFVEEVERRRKEYYKESGARLEDLLDDMQVSSLVKRPIYRTLDIVRDVCKACKEPPEKIFLEMARGTKAKEGRKVSRRERLQALYKQIKTKDCAEVDRMLTELQGKSDRQLRSNALYLYFVQLGKDMYSGEPIDLEHIKDRTRYDIDHIFPQSVVKDDSLDNRVLTATEINGKKGNRYPLDSEIQHRMAPFWKMLKEKGLISEGKYNRLMRTTPFTSDERWGFINRQLVETSQSTKALATILQRKFPKAKIVYVKAGLISDFRREYDLVKSRLINDLHHAKDAYLNIVVGNVYDTRFNKQWFRVEEPYSIKLKSLFKHPVQARKNSPVVWNGEADIGRIKKTVAKNNVHYTRYAFVRKGGFYDQMPVRAKTGLIPLKKGLETEKYGGYNKSTASFYCFAVFDMLEKKSTKREAMLVPVALHEAVFVEKDKTYAEEYLRNTIAQIINKTPDCIQNIEFPLGLRKIKINTVLSLDGFQVCIAGKSNGGEYFLAPSLMPLSVTREQEEYVKCLESFRKKMEGNREITIDEQYDKITKQQNVELYDFFVEKLQNFPYATFLLLKRATKTLVAGRHMFLSMATQEQVSTLLNVLDLFTTGRTTGCDLRNVGGVEHAAAVPMAAKFSGYRGKYKAVRIVNVSASGLFQSESKNLLEYL

SEQ ID NO: 1079 - protein, 1377 aa, synthetic construct
  REGION 1..1377: note = MG46-183 effector
MKKRTIEEYYLGLDIGTNSVGYAVTDPQYKILKYHGEPMWGSHVFEEGSQCAERRGFRTARRRLNRRQQRVRFVQEIFAHEIEKVDSRFFLRIKESALYREDANGNDPFILFNDNGYTDKEYYLKYPTIHHLIMDLIDDENPHDVRLVYLAVAWLVAHRGHFLSDVEKTNVEKVLDFSTSYNAFKEMYHSIGQDISWIDEEETFKNILLKRCGVKDKEKAFKDELFKNNSNKKTSEGTEENDILGTNSVITLLSGGTVTADKLFVQAEFQDKISISFKKNEDEFEQILTELDEYAEYLLKIRAVYDWAVLYEASQGQVYISKAKIEVYEQHKKDLAGLKAFIRKYCTDKYNEIFRDAGDNNYVAYSYNFNSLNLDEGEKRPKRKASQEDFCTYIRKIVKDIKCEMEDKEFYEDMGKRLELGTFMPKQVNTDNRVLPYQLYYFELARLLEKVSSYLPFINEKDSEGYITKEKLLSIMEFRIPYYVGPLHRDHKENNSFAWIKRKAQGRIYPWNYEEKIDLDASEQTFIDKMTNQCSYLPGEDVLPKYSLLYCKYEVLNEINNIKINGQRITVDCKKEIFGLFKRNKKVTVKRIRDFLVSNNYMSDSDEITGLDISVKSSLKSYHDFRRMLDNKTVNEEDVEEIIKRLTYTEDKKRINKYLEENYPNISEEDRRYISKLKYKDFGRLSEKFLTGIKGVVKETGEILSVIHIMWETNDNLMQIIFSDHYTIRDVLEREREDYYSEHPASVEQILSDMYVSNAVKRPIYRTLDIIGDVTKACQNAPRKIFVEMARGGGEKGKRTVSRRDKIKELYKHMDKQEVREISKEISELLGELDKKTDNELQSEVLFLYFMQLGICMYSGDPIDITKLKSDAYVNVDHIYPQAYVKDDSLNNKVLVKSKLNGEKSDNYPINKDIRDKMSSIWKHYRKEGLISEEKYNRLTRKTPFTDEEKQGFVNRQLVETRQSTKAVAEILKTMFPKTEVVYVKAGLASEFRHAFGIIKSRQINDLHHAKDAYLNVVCGNVYHSTFTKKFFQNNPKYSIKTETVYKRKIEVDGKPIWNGQESLSFVIKMLGKNNIHYTRYAFCRKGGFFDQMPVTAKEGLVSRKKNLPSEKYGGYNKPTASYFIMAKYTEKVKKEKQDIMIVPVELMVGEKVLNDKNFAVGYIQQQIAQISNRKVEEIVNVSFPLGLRPLKVNTRFSFDGFEACVTGKANGGKILGISSLVALKMDNKKDNYIKKVEKYIEKRKLNINIKLDEKYDGINYESNQMIYNILVEKIQCSIYKTMFGSLVEGLENAKSIFEQLSLEEQCLCINSLINVFKTGRSSGCDLTLIGGKKQAAVCTVSSKVSNWGKNYKCVKIIDESASGIFRKESENILEWL

SEQ ID NO: 1080 - protein, 1367 aa, synthetic construct
  REGION 1..1367: note = MG46-184 effector
MEKEYYLGLDIGTNSVGYAVTDSEYKILKYKGEPMWGSHVFEEGSQCAERRGFRTARRRLDRRQQRVRLVQEIFANEISLVDDKFYIRLKESALYQEDKSGNNPYSVFADDNYTDKEYYEKYPTIHHLIMDLIEDEQPHDVRLVYMAAAWLVAHRGHFLSDVEKTHVEKVLDFDGVYRELQEYYNDNGYTIPWKDDEECFKDILLQNCGVRDKENLFKSKLFEGTSYKSKEDDSIGNEAVITLLAGGTVDARKLFLNAEFEEKISICFRKSEEEFESVLIELDDYADFLIRLRAVYDWSLLYEASGGQSYISKAKIAAYDQHKKDLNYLKYFIKKYCPEKYESVFRKPIEGNYVMYSYNFSSIKENEKRPNRKTSQEDFCAYIKKIIKDVDCDIEDQTAYEDMMMRLDLCTFMPKQVNNDNRVIPYQLYYYELSKILDTVSKYLPFIDEVDSDGYSNRQKLLSIMEFRVPYYVGPLHREHEKSSFAWVQRKANGRIYPWNYKEKVDLDASEQAFINKMTNQCSYLPGEDVLPKYSLKYCAFEVLNEINNIKINGIDIPVECKQGIYRLFEKKRKVTRKDILDYLKSNNYMTDHDEMTGIDVNVKSSLKSYHDFRKLLESEMLNNKEVEEIITYLTYTEDKARIRKFLNEKYANLPEEDRKYISKLKYKDFGRLSEKFLVGVKAAIVGTEECVNLMHALWETNDNLMQIIFSDKYTFKEQIESEKQQYYENNPKGLEQLLDDMYVSNAVKRPIYRTLDVANDVRKACGRPPKKIFVEMARGGGEKGKRSVSRRDQIKELYNKKTSDSVVNKQEIREISRLLDSKTDNELQSEVLFLYFMQLGKCMYSGEPIDIERIKSDTYVNIDHIYPQAYVKDDSLNNKVLVKSELNGLKSDKYPINSEIRKKMSPIWKSYRDRGLISEEKFYRLTRQNGFSQEEKQGFINRQLVETRQSTKAITEVLKSKFPDTEIVYVKAGLAADFKHEYGIVKSRSINDLHHAKDAYLNIVCGNVYHTKFTKKFFMNHDEYSIKTSTVYKKPIVVDGECIWNGEESIAFVKKVLSKNNIHYTRYAFCRKGGLFKQKPVAKKEGLIPRKMELDTTKYGGYNMSTAAFFMFAKYTEKVKKEKTDIMLVPIDLMVANKVLSDEIFAIEYIRGEIAEISNKKKEEIINISFPYGFRPIKINTRFSFDGFEACVTGKDSGGSKISLSSLVPLICDVNQEKYIKKIEKYCEKKQINNRIVVDGVYDGISSEKNGILYNCLIEKMCNTIYKKAVFINADLRTKLKAGNDLFEKLDCDEQCFCLMQLIKLFKTGRSEKCDFTLLGSKKNEASYRLNSKISNWLKYYSSVKIIDESSSGIFRTESDNILEWL

SEQ ID NO: 1081 - protein, 1377 aa, synthetic construct; identical to SEQ ID NO: 236
  REGION 1..1377: note = MG46-185 effector

SEQ ID NO: 1082 - protein, 1367 aa, synthetic construct
  REGION 1..1367: note = MG46-186 effector
MEKEYYLGLDIGTNSVGYAVTDSEYKILKYKGEPMWGSHVFEEGSQCAERRGFRTARRRLDRRQQRVRLVQEIFANEISLVDDKFYIRLKESALYQEDKSGNNPYSVFADDNYTDKEYYEKYPTIHHLIMDLIEDEQPHDVRLVYMAAAWLVAHRGHFLSDVEKTHVEKVLDFDGVYRELQEYYNDNGYTIPWKDDEECFKDILLQNCGVRDKENLFKSKLFEGTSYKSKEDDSIGNEAVITLLSGGTVDARKLFLNAEFEEKISICFRKSEEEFESVLIDLDDYADFLIRLRAVYDWSLLYEASGGQSYISKAKIAAYDQHKKDLNYLKYFIKKYCPEKYESVFRKPIEGNYVMYSYNFSSIKENEKRPNRKTSQEDFCAYIKKIIKDVDCDIEDQTGYEDMMMRLDLCTFMPKQVNNDNRVIPYQLYYYELSKILDTVSKYLPFIDEVDSDGYSNRQKLLSIMEFRVPYYVGPLHREHEKSSFAWVQRKANGRIYPWNYKEKVDLDASEQAFINKMTNQCSYLPGEDVLPKYSLKYCAFEVLNEINNIKINGIDIPVECKQEIYRLFEKKRKVTRKDILDYLKSNNYMTDHDEMTGIDVNVKSSLKSYHDFRKLLESEMLNNKEVEEIITYLTYTEDKARIRKFLNEKYANLPEEDRKYISKLKYKDFGRLSEKFLVGVKAAIVGTEECVNLMHALWETNDNLMQIIFSDKYTFKEQIESEKQQYYENNPKGLEQLLDDMYVSNAVKRPIYRTLDVVNDVRKACGRPPKKIFVEMARGGGEKGKRSVSRRDQIKELYNKKTSDSVVNKQEIREISRLLDSKTDNELQSEVLFLYFMQLGKCMYSGEPIDIERIKSDTYVNIDHIYPQAYVKDDSLNNKVLVKSELNGLKSDKYPINSEIRKKMSPIWKSYRDRGLISEEKFYRLTRQNGFSQEEKQGFINRQLVETRQSTKAITEVLKSKFPDTEIVYVKAGLAADFKYEYGIVKSRSINDLHHAKDAYLNIVCGNVYHTKFTKKFFMNHDEYSIKTSTVYKKPIVVDGECIWNGEESIAFVKKVLSKNNIHYTRYAFCRKGGLFKQKPVAKKEGLIPRKMELDTTKYGGYNMSTAAFFMFAKYTEKVKKEKTDIMLVPIDLMVANKVLSDETFAIEYIRGEIAEISNKKKEEIINISFPYGFRPIKINTRFSFDGFEACVTGKDSGGSKISLSSLVPLICDVNQEKYIKKIEKYCEKKQINNRIVVDGVYDGISSEKNCILYNCLIEKMCNTIYKKAVFINADLRTKLKAGNDLFEKLDCDEQCFCLMQLIKLFKTGRSEKCDFTLLGSKKNEASYRLNSKISNWLKYYSSVKIIDESSSGIFRTESDNILEWL

SEQ ID NO: 1083 - protein, 670 aa, synthetic construct
  REGION 1..670: note = MG46-187 effector
KKYCPEKYESVFRKPIEGNYVMYSYNFSSIKENEKRPNRKTSQEDFCAYIKKIIKDVDCDIEDQTAYEDMMMRLDLCTFMPKQVNNDNRVIPYQLYYYELSKILDTVSKYLPFIDEVDSDGYSNRQKLLSIMEFRVPYYVGPLHREHEKSSFAWVQRKANGRIYPWNYKEKVDLDASEQAFINKMTNQCSYLPGEDVLPKYSLKYCAFEVLNEINNIKINGIDIPVECKQEIYRLFEKKRKVTRKDILDYLKSNNYMTDHDEMTGIDVNVKSSLKSYHDFRKLLESEMLNNKEVEEIITYLTYTEDKARIRKFLNEKYANLPEEDRKYISKLKYKDFGRLSEKFLVGVKAAIVDTGECVNLMHALWETNDNLMQIIFSDKYTFKEQIESEKQQYYEDNPKSLEQLLDDMYVSNVVKRPIYRTLDVVNDVRKACGRPPKKIFVEMARGGGEKGKRSVSRRDQIKELYKSVDKQEVREISKLLDSKTDNELQSEVLFLYFMQLGKCMYSGETIDIERIKSDTYVNVDHIYPQAYVKDDSLNNKVLVKSELNGLKSDKYPINSEIRKKMFPIWKSYRERGLISEEKFYRLTRQNGFSQEEKQGFINRQLVETRQSTKAITEVLKSKFPDTEIVYVKAGLAADFKHEYGIVKSRSINDLHHAIHDGLPFRSIDQ

SEQ ID NO: 1084 - protein, 1358 aa, synthetic construct
  REGION 1..1358: note = MG46-188 effector
MEKEYYLGLDIGTNSVGYAVTDSEYKILKYKGEPMWGSHVFEEGSQCAERRGFRTARRRLDRRQQRVRLVQEIFANEISLVDDKFYIRLKESALYQEDKSGNNPYSVFADDNYTDKEYYEKYPTIHHLIMDLIEDEQPHDVRLVYMAAAWLVAHRGHFLSDVEKTHVEKVLDFDGVYRELQEYYNDNGYTIPWKDDEECFKDILLQNCGVRDKENLFKSKLFEGTSYKSKEDDSIGNEAVITLLAGGTVDARKLFLNAEFEEKISICFRKSEEEFESVLIELDDYADFLIRLRAVYDWSLLYEASGGQSYISKAKIAAYDQHKKDLNYLKYFIKKYCPEKYESVFRKPIEGNYVMYSYNFSSIKENEKRPNRKTSQEDFCAYIKKIIKDVDCDIEDQTAYEDMMMRLDLCTFMPKQVNNDNRVIPYQLYYYELSKILDTVSKYLPFIDEVDSDGYSNRQKLLSIMEFRVPYYVGPLHREHEKSSFAWVQRKANGRIYPWNYKEKVDLDASEQAFINKMTNQCSYLPGEDVLPKYSLKYCAFEVLNEINNIKINGIDIPVECKQGIYRLFEKKRKVTRKDILDYLKSNNYMTDHDEMTGIDVNVKSSLKSYHDFRKLLESEMLNNKEVEEIITYLTYTEDKARIRKFLNEKYANLPEEDRKYISKLKYKDFGRLSEKFLVGVKAAIVDTGECVNLMHALWETNDNLMQIIFSDKYTFKEQIESEKQQYYEDNPKSLEQLLDDMYVSNAVKRPIYRTLDVVNDVRKACGRPPKKIFVEMARGGGEKGKRSVSRRDQIKELYKSVDKQEVREISKLLDSKTDNELQSEVLFLYFMQLGKCMYSGETIDIERIKSDTYVNVDHIYPQAYVKDDSLNNKVLVKSELNGLKSDKYPINSEIRKKMFPIWKSYRERGLISEEKFYRLTRQNGFSQEEKQGFINRQLVETRQSTKAITEVLKSKFPDTEIVYVKAGLAADFKHEYGIVKSRLINDLHHAKDAYLNIVCGNVYHTKFTKKFFMKHDEYSIKTSTVYKKPIVVDGECIWNGEESIAFVKKVLSKNNIHYTRYAFCRNGGLFDQMPVTKKEGLIPRKMELDTTKYGGYNKSTASFFIFAKYTEKAKKEKTDIMLVPIDLMVANKVLSDETFAIEYICGEIAEISNKKKEEIINISFPYRLRPIKINTRFSFDGFEACVTGKANGGQIIGLSSLMSLKLSSDDEKYIKKIDNYINKKKVNKKLIIDVAYDKICEESNKLLYLNLLNKLQSSIYQNVFGNQIGVIEDGLEKFLLLTKEEQCTVLFNIISLFKTGRGSGCDLTLIGGKKQAAVYNIGSKVSNWVKTYKCVKIIDESPSGIFRTESDNILEWL

SEQ ID NO: 1085 - protein, 1361 aa, synthetic construct
  REGION 1..1361: note = MG46-189 effector
MGYYLGLDVGTNSVGYAVTDEQYRLRKFHGNPMWGSHVFEEAKPAAERRGFRTARRRLNRRQQRVQLVQDIFAREIAKVDSRFFIRRQQSRLHRDDVEAGDRNLLFNDVTFTDKEYYANYPTIHHLLLELMQSDAPHDVRLVYLAVAWLVAHRGHFLSEVDKDNVEAVLRFDEVYQDFQDVLGMYGLDPWTCDEKKLQSVLLQRKRIKEQQKDLEMLVYPGQKLKAGEEDRVDKKLLLNLLAGGTVSLEKLFPQLTLEENKKLCFQDSEDKVEEALQVLDEQADLVIQLRRLYDWALLKHSLQGSLFVSEAKVKIYEQHRKDLADLKDFVRRCAPKQYNRIFRTMDGKDTLANYVAYSYELSNVKGRILPKKKATQAEFCDFLKKELENVSCSGADKTLYDSMKARWEDHTFLPKQVNGDNRIVPYQLYYHELKMILQKAEKYLPFLAVKDSDGMTAKEKLLSIMTFRIPYFVGPLCKAHSHIAWIERKADGKIYPWNFDQMVDLDASEAAFVRKMTNMCTYLPDQPVLPMQSLLYERFVVLNEINNLKVNGVPISVEAKQGIYGLFTQKRKVTRKDVEAFLLSNGWIERGDVVSGVDATIKSALTSKHDFRSLLERKVLTEDEVERIIEHLTYTEDRTRSRRWLQEQFPQLAAQDIQYVAKLKYKEFGRLSQEFLAGLQGVDKETEEQNSILGFLWGTNDNLMQLLSDRYTFADEIERRQKEYYKESGARLEDILDDMRVSSLVKRPIYRTLDIVRDVCKVCKEPPEKIFLEMARGTKAKEDRKVSRRERLQALYKQIKTKDCAEVDRMLTELQGKSDRQLRSNALYLYFVQLGKDMYSGKPIDLEHIKDRTRYDIDHIFPQSVVKDDSLDNRVLTATEINGKKGNRYPLDSEIQHRMAPFWKMLKEKGLISEGKYNRLTRMTPFTADERWGFINRQLVETSQSTKALATILQRKFPKAKIVYVKAGLVSDFRCEYDLVKSRLVNDLHHAKDAYLNIVVGNVYDTRFNRRWFRVEEPYSVKLKTLFKHPVQARKNSPVVWNGETDIGRIKKIVAKNNVHYTRYAFVRKGGFYNQMPVRAKTGLIPLKKGLETEKYGGYDSIRVAFFYLVRCEVADKKPKRDMVFVPVHVYLVDRIQKDQEFFKSYIMYKVSDILGKPINAIKNVDFPVGLRKIKLNTVLSLDGLLMVVKSEDSEARFKTALLLPLLCSREQEKYIWRLERFREKILKDSKILVSEEYDHITPEENIALFKFLISKLKYRPYALFLTLSNIQKILEDKEQEFVALSTENQVLLLLNLLDVFRAGRSDGCDLRFIGLSKNSVKMRMSEKLSTIIKKYHLMKIIDVSASGLFQSESKNLLEYL

SEQ ID NO: 1086 - protein, 1377 aa, synthetic construct; identical to SEQ ID NO: 249
  REGION 1..1377: note = MG46-190 effector

SEQ ID NO: 1087 - protein, 1363 aa, synthetic construct
  REGION 1..1363: note = MG46-191 effector
MGYYLGLDVGTNSVGYAVTDEQYRLRKFHGNPMWGSHVFEEAKPAAEQRGFRTARRRLNRRQQRVQLVQDIFAREIAKVDSRFFIRRQQSRLHRDDVEAGDRNLLFNDVTFTDKEYYANYPTVHHLLLELMQSDAPHDVRLVYLAVAWLVAHRGHFLSEVDKDNVEAVLRFDEVYQDFQDVLGMYGLDPWTCDEKKLQSVLLQRKRIKEQQKDLEMLVYPGQKLKAGEEDRVDKKLLLNLLAGGTVSLEKLFPQLTLEENKKLCFQDSEDKVEEALQVLDEQADLVIQLRRLYDWALLKHSLQGSLFVSEAKVKIYEQHRKDLADLKDFVRRCAPKQYNRIFRTMDGKDTLANYVAYSYELSNVKGRILPKKKATQAEFCDFLKKELENVSCSGADKTLYDSMKARWEDHTFLPKQVNGDNRIIPYQLYYHELKMILQKAEKYLPFLTVKDSDGMTAKEKLLSIMTFRIPYFVGPLCKAHSHIAWIERKADGKIYPWNFDQMVDLDASEAAFVRKMTNMCTYLPDQPVLPMQSLLYERFVVLNEINNLKVNGVPISVEAKQGIYGLFTQKRKVTRKDVEAFLLSNGCIERGDVVSGVDATIKSALTSKHDFRSLLERKVLTEDEVERIIEHLTYTEDRTRSRRWLQEQFPQLAAQDIQYVAKLKYKEFGRLSQEFLAGLQGVDKETGEQNSILGFLWGTNDNLMQLLSDRYTFADEIERRQKEYYKESGARLEDILDDMRVSSLVKRPIYRTLDIVRDVCKVCKEPPEKIFLEMARGTKVKEGRKVSRRERLQALYKEIKTKDCAEVDRMVTELQGKTDRQLRSDALYLYFVQLGKDMYSGKPIDLEHIKDRTRYDIDHIFPQSVVKDDSLDNRVLTATEINSQKGNRYPLNPEIRSRMIPFWKMLKEKGLISEGKYNRLTRMTPFTADERWGFINRQLVETSQSTKALATILQRKFPKAKIVYVKAGLVSDFRREYDLVKSRLVNDLHHAKDAYLNIVVGNVYDTRFNRQWFRVEEPYSVKLKTLFKHPVQARKNSPVVWNGETDIGRIKKIVAKNNAHYTRYAFVRKGGFYDQMPVRAKTGLIPLKKGLETEKYGGYNKATASFYCFVVFDMVERKSAKREGMLVPVALHEAVFVEKDKTYAEEYLRNTIAQIINKTSDCIQNIEFLLGLRKIKINTVLSLDGFQVSIAGKSNGGEYFLAPSLMPLSVTREQEEYVKCLESFRKKMEGNKEITIDEQYDKITKQQNVELYDFFVEKLQNFPYATFLLLKRATKTLVAGRHMFLSMATQEQVSTLLNVLDLFTTGRTTGCDLRNVGGVEHAAAVPMAAKFSGYKGKYKAVRIVNVSASGLFQSESKNLLEYL

SEQ ID NO: 1088 - protein, 973 aa, synthetic construct
  REGION 1..973: note = MG46-192 effector
SCSVADKTLYDSMKARWEDHTFLPKQVNGDNRIIPYQLYYHELKMILQKAEKYLPFLTVKDSDGMTAKEKLLSIMTFRIPYFVGPLCKAHSHIAWIERKADGKIYPWNFDQMVDLDASEAAFVRKMTNMCTYLPDQPVLPMQSLLYERFVVLNEINNLKVNGVPISVEAKQGIYGLFTQKRKVTRKDVEAFLLSNGCIERGDVVSGVDATIKSALTSKHDFRSLLERKVLTEDEVERIIEHLTYTEDRTRSRRWLQEQFPQLAAQDIQYVAKLKYKEFGRLSQEFLAGLQGVDKETGEQNSILGFLWGTNDNLMQLLSDRYTFADEIERRQKEYYKESGARLEDILDDMRVSSLVKRPIYRTLDIVRDVCKVCKEPPEKIFLEMARGTKVKEGRKVSRRERLQALYKEIKTKDCAEVDRMVTELQGKTDRQLRSDALYLYFVQLGKDMYSGKPIDLEHIKDRTRYDIDHIFPQSVVKDDSLDNRVLTATEINSQKGNRYPLNPEIRSRMIPFWKMLKEKGLISEGKYNRLTRMTPFTADERWGFINRQLVETSQSTKALATILQRKFPKAKIVYVKAGLVSDFRREYDLVKSRLVNDLHHAKDAYLNIVVGNVYETRFNRQWFRVEEPYSVKLKTLFKHPVQARKNSPVVWNGETDIGRIKKIVAKNNAHYTRYAFVRKGGFYDQMPVRAKTGLIPLKKGLETEKYGGYNKATASFYCFVVFDMVERKSAKREGMLVPVALHEAVFVEKDKTYAEEYLRNTIAQIINKTPDCIQNIEFPLGLRKIKINTVLSLDGFQVSIAGKSNGGEYFLAPSLMPLSVTREQEEYVKCLESFRKKMEGNKEITIDEQYDKITKQQNVELYDFFVEKLQNFPYATFLLLKRATKTLVAGRHMFLSMATQEQVSTLLNVLDLFTTGRTTGCDLRNVGGVEHAAAVPMAAKFSGYKGKYKAVRIVNVSASGLFQSESKNLLEYL

SEQ ID NO: 1089 - protein, 1363 aa, synthetic construct
  REGION 1..1363: note = MG46-193 effector
MGYYLGLDVGTNSVGYAVTDEQYRLRKFHGNPMWGSHVFEEAKPAAERRGFRTARRRLNRRQQRVQLVQDIFAREIAKVDSRFFIRRQQSRLHRDDVEAGDRNLLFNDVTFTDKEYYANYPTVHHLLLELMQSDAPHDVRLVYLAVAWLVAHRGHFLSEVDKDNVEAVLRFDEVYQDFQDVLGMYGLDPWTCDEKKLQSVLLQRKRIKEQQKDLEMLVYPGQKLKAGEEDRVDKKLLLNLLAGGTVSLEKLFPQLTLEENKKLCFQDSEDKVEEALQVLDEQADLVIQLRRLYDWALLKHSLQGSLFVSEAKVKIYEQHRKDLADLKDFVRRCAPKQYNRIFRTMDGKDTLANYVAYSYELSNVKGRILPKKKATQAEFCDFLKKELENVSCSGADKTLYDSMKARWEDHTFLPKQVNGDNRIIPYQLYYHELKMILQKAEKYLPFLTVKDSDGMTAKEKLLSIMTFRIPYFVGPLCKAHSHIAWIERKADGKIYPWNFDQMVDLDASEAAFVRKMTNMCTYLPDQPVLPMQSLLYERFVVLNEINNLKVNGVPISVEAKQGIYGLFTQKRKVTRKDVEAFLLSNGCIERGDVVSGVDATIKSALTSKHDFRSLLERKVLTEDEVERIIEHLTYSEDRTRSRRWLQEQFPQLAAQDIQYVAKLKYKEFGRLSQEFLAGLQGVDKETGEQNSILGFLWGTNDNLMQLLSDRYTFADEIERRQKEYYKESGARLEDILDDMRVSSLVKRPIYRTLDIVRDVCKVCKEPPEKIFLEMARGTKVKEGRKVSRRERLQALYKEIKTKDCAEVDRMVTELQGKTDRQLRSDALYLYFVQLGKDMYSGKPIDLEHIKDRTRYDIDHIFPQSVVKDDSLDNRVLTATEINSQKGNRYPLNPEIRSRMIPFWKMLKEKGLISEGKYNRLTRMTPFTADERWGFINRQLVETSQSTKALATILQRKFPKAKIVYVKAGLVSDFRREYDLVKSRLVNDLHHAKDAYLNIVVGNVYDTRFNRQWFRVEEPYSVKLKTLFKHPVQARKNSPVVWNGETDIGRIKKIVAKNNAHYTRYAFVRKGGFYDQMPVRAKTGLIPLKKGLETEKYGGYNKATASFYCFVVFDMVERKSAKREGMLVPVALHEAVFVEKDKTYAEEYLRNTIAQIINKTPDCIQNIEFPLGLRKIKINTVLSLDGFQVSIAGKSNGGEYFLAPSLMPLSVTREQEEYVKCLESFRKKMEGNKEITIDEQYDKITKQQNVELYDFFVEKLQNFPYATFLLLKRATKTLVAGRHMFLSMATQEQVSTLLNVLDLFTTGRTTGCDLRNVGGVEHAAAVPMAAKFSGYKGKYKAVRIVNVSASGLFQSESKNLLEYL

SEQ ID NO: 1090 - protein, 521 aa, synthetic construct
  REGION 1..521: note = MG46-194 effector
PIDLEHIKDRTRYDIDHIFPQSVVKDDSLDNRVLTATEINSQKGNRYPLNPEIRSRMIPFWKMLKEKGLISEGKYNRLTRMTPFTADERWGFINRQLVETSQSTKALATILQRKFPKAKIVYVKAGLVSDFRREYDLVKSRLVNDLHHAKDAYLNIVVGNVYDTRFNRQWFRVEEPYSVKLKTLFKHPVQARKNSPVVWNGETDIGRIKKIVAKNNAHYTRYAFVRKGGFYDQMPVRAKTGLIPLKKGLETEKYGGYNKATASFYCFVVFDMVERKSAKREGMLVPVALHEAVFVEKDKTYAEEYLRNTIAQIINKTPDCIQNIEFPLGLRKIKINTVLSLDGFQVSIAGKSNGGEYFLAPSLMPLSVTREQEEYVKCLESFRKKMEGNKEITIDEQYDKITKQQNVELYDFFVEKLQNFPYATFLLLKRATKTLVAGRHMFLSMATQEQVSTLLNVLDLFTTGRTTGCDLRNVGGVEHAAAVPMAAKFSGYKGKYKAVRIVNVSASGLFQSESKNLLEYL

SEQ ID NO: 1091 - protein, 760 aa, synthetic construct
  REGION 1..760: note = MG46-195 effector
ALTSKHDFRSLLERKVLTEDEVERIIEHLTYTEDRTRSRRWLQEQFPQLAAQDIQYVAKLKYKEFGRLSQEFLAGLQGVDKETGEQNSILGFLWGTNDNLMQLLSDRYTFADEIERRQKEYYKESGARLEDILDDMRVSSLVKRPIYRTLDIVRDVCKVCKEPPEKIFLEMARGTKVKEGRKVSRRERLQALYKEIKTKDCAEVDRMVTELQGKTDRQLRSDALYLYFVQLGKDMYSGKPIDLEHIKDRTRYDIDHIFPQSVVKDDSLDNRVLTATEINSQKGNRYPLNPEIRSRMIPFWKMLKEKGLISEGKYNRLTRMTPFTADERWGFINRQLVETSQSTKALATILQRKFPKAKIVYVKAGLVSDFRREYDLVKSRLVNDLHHAKDAYLNIVVGNVYDTRFNRQWFRVEEPYSVKLKTLFKHPVQARKNSPVVWNGETDIGRIKKIVAKNNAHYTRYAFVRKGGFYDQMPVRAKTGLIPLKKGLETEKYGGYNKATASFYCFVVFDMVERKSAKREGMLVPVALHEAVFVEKDKTYAEEYLRNTIAQIINKTPDCIQNIEFPLGLRKIKINTVLSLDGFQVSIAGKSNGGEYFLAPSLMPLSVTREQEEYVKCLESFRKKMEGNKEITIDEQYDKITKQQNVELYDFFVEKLQNFPYATFLLLKRATKTLVAGRHMFLSMATQEQVSTLLNVLDLFTTGRTTGCDLRNVGGVEHAAAVPMAAKFSGYKGKYKAVRIVNVSASGLFQSESKNLLEYL

SEQ ID NO: 1092 - protein, 1373 aa, synthetic construct
  REGION 1..1373: note = MG46-196 effector
MVTDLGGFVKMGYYLGLDVGTNSVGYAVTDEQYRLRKFHGNPMWGSHVFEEAKPAAERRGFRTARRRLNRRQQRVQLVQDIFAREIAKVDSRFFIRRQQSRLHRDDVEAGDRNLLFNDVTFTDKEYYANYPTVHHLLLELMQSDAPHDVRLVYLAVAWLVAHRGHFLSEVDKDNVEAVLRFDEVYQDFQDVLGMYGLDPWTCDEKKLQSVLLQRKRIKEQQKDLEMLVYPGQKLKAGEEDRVDKKLLLNLLAGGTVSLEKLFPQLTLEENKKLCFQDSEDKVEEALQVLDEQADLVIQLRRLYDWALLKHSLQGSLFVSEAKVKIYEQHRKDLADLKDFVRRCAPKQYNRIFRTMDGKDTLANYVAYSYELSNVKGRILPKKKATQAEFCDFLKKELENVSCSGADKTLYDSMKARWEDHTFLPKQVNGDNRIIPYQLYYHELKMILQKAEKYLPFLTVKDSDGMTAKEKLLSIMTFRIPYFVGPLCKAHSHIAWIERKADGKIYPWNFDQMVDLDASEAAFVRKMTNMCTYLPDQPVLPMQSLLYERFVVLNEINNLKVNGVPISVEAKQGIYGLFTQKRKVTRKDVEAFLLSNGCIERGDVVSGVDATIKSALTSKHDFRSLLERKVLTEDEVERIIEHLTYTEDRTRSRRWLQEQFPQLAAQDIQYVAKLKYKEFGRLSQEFLAGLQGVDKETGEQNSILGFLWGTNDNLMQLLSDRYTFADEIERRQKEYYKESGARLEDILDDMRVSSLVKRPIYRTLDIVRDVCKVCKEPPEKIFLEMARGTKVKEGRKVSRRERLQALYKEIKTKDCAEVDRMVTELQGKTDRQLRSDYLYMYFVQLGKDMYSGKPIDLEHIKDRTRYDIDHIFPQSVVKDDSLDNRVLTATEINSQKGNRYPLNPEIRSRMIPFWKMLKEKGLISEGKYNRLTRMTPFTADERWGFINRQLVETSQSTKALATILQRKFPKAKIVYVKAGLVSDFRREYDLVKSRLVNDLHHAKDAYLNIVVGNVYDTRFNRKWFRVEEPYSVKLKTLFKHPVQARKNSPVVWNGETDIGRIKKIVAKNNAHYTRYAFVRKGGFYDQMPVRAKTGLIPLKKGLETEKYGGYNKATASFYCFVVFDMVERKSAKREGMLVPVALHEAVFVEKDKTYAEEYLRNTIAQIINKTPDCIQNIEFPLGLRKIKINTVLSLDGFQVSIAGKSNGGEYFLAPSLMPLSVTREQEEYVKCLESFRKKMEGNKEITIDEQYDKITKQQNVELYDFFVEKLQNFPYATFLLLKRATKTLVAGRHMFLSMATQEQVSTLLNVLDLFTTGRTTGCDLRNVGGVEHAAAVPMAAKFSGYKGKYKAVRIVNVSASGLFQSESKNLLEYL

SEQ ID NO: 1093 - protein, 1373 aa, synthetic construct
  REGION 1..1373: note = MG46-197 effector
MVTDLGGFVKMGYYLGLDVGTNSVGYAVTDEQYRLRKFHGNPMWGSHVFEEAKPAAERRGFRTARRRLNRRQQRVQLVQDIFAREIAKVDSRFFIRRQQSRLHRDDVEAGDRNLLFNDVTFTDKEYYANYPTVHHLLLELMQSDAPHDVRLVYLAVAWLVAHRGHFLSEVDKDNVEAVLRFDEVYQDFQDVLGMYGLDPWTCDEKKLQSVLLQRKRIKEQQKDLEMLVYPGQKLKAGEEDRVDKKLLLNLLAGGTVSLEKLFPQLTLEENKKLCFQDSEDKVEEALQVLDEQADLVIQLRRLYDWALLKHSLQGSLFVSEAKVKIYEQHRKDLADLKDFVRRCAPKQYNRIFRTMDGKDTLANYVAYSYELSNVKGRILPKKKATQAEFCDFLKKELENVSCSGADKTLYDSMKARWEDHTFLPKQVNGDNRIIPYQLYYHELKMILQKAEKYLPFLTVKDSDGMTAKEKLLSIMTFRIPYFVGPLCKAHSHIAWIERKADGKIYPWNFDQMVDLDASEAAFVRKMTNMCTYLPDQPVLPMQSLLYERFVVLNEINNLKVNGVPISVEAKQGIYGLFTQKRKVTRKDVEAFLLSNGCIERGDVVSGVDATIKSALTSKHDFRSLLERKVLTEDEVERIIEHLTYTEDRTRSRRWLQEQFPQLAAQDIQYVAKLKYKEFGRLSQEFLAGLQGVDKETGEQNSILGFLWGTNDNLMQLLSDRYTFADEIERRQKEYYKESGARLEDILDDMRVSSLVKRPIYRTLDIVRDVCKVCKEPPEKIFLEMARGTKVKEGRKVSRRERLQALYKEIKTKDCAEVDRMVTELQGKTDRQLRSDALYLYFVQLGKDMYSGKPIDLEHIKDRTRYDIDHIFPQSVVKDDSLDNRVLTATEINSQKGNRYPLNPEIRSRMIPFWKMLKEKGLISEGKYNRLTRMTPFTADERWGFINRQLVETSQSTKALATILQRKFPKAKIVYVKAGLVSDFRREYDLVKSRLVNDLHHAKDAYLNIVVGNVYDTRFNRQWFRVEEPYSVKLKTLFKHPVQARKNSPVVWNGETDIGRIKKIVAKNNAHYTRYAFVRKGGFYDQMPVRAKTGLIPLKKGLETEKYGGYNKATASFYCFVVFDMVERKSAKREGMLVPVALHEAVFVEKDKTYAEEYLRNTIAQIINKTPDCIQNIEFPLGLRKIKINTVLSLDGFQVSIAGKSNGGEYFLAPSLMPLSVTREQEEYVKCLESFRKKMEGNKEITIDEQYDKITKQQNVELYDFFVEKLQNFPYATFLLLKRATKTLVAGRHMFLSMATQEQVSTLLNVLDLFTTGRTTGCDLRNVGGVEHAAAVPMAAKFSGYKGKYKAVRIVNVSASGLFQSESKNLLEYL

SEQ ID NO: 1094 - protein, 1363 aa, synthetic construct
  REGION 1..1363: note = MG46-198 effector
MGYYLGLDVGTNSVGYAVTDEQYRLRKFHGNPMWGSHVFEEAKPAAERRGFRTARRRLNRRQQRVQLVQDIFAREIAKVDSRFFIRRQQSRLHRDDVEAGDRNLLFNDVTFTDKEYYANYPTVHHLLLELMQSDAPHDVRLVYLAVAWLVAHRGHFLSEVDKDNVEAVLRFDEVYQDFQDVLGMYGLDPWTCDEKKLQSVLLQRKRIKEQQKDLEMLVYPGQKLKAGEEDRVDKKLLLNLLAGGTVSLEKLFPQLTLEENKKLCFQDSEDKVEEALQVLDEQADLVIQLRRLYDWALLKHSLQGSLFVSEAKVKIYEQHRKDLADLKDFVRRCAPKQYNRIFRTMDGKDTLANYVAYSYELSNVKGRILPKKKATQAEFCDFLKKELENVSCSGADKTLYDSMKARWEDHTFLPKQVNGDNRIIPYQLYYHELKMILQKAEKYLPFLAVKDSDGMTAKEKLLSIMTFRIPYFVGPLCKAHSHIAWIERKADGKIYPWNFDQMVDLDASEAAFVRKMTNMCTYLPDQPVLPMQSLLYERFVVLNEINNLKVNGVPISVEAKQGIYGLFTQKRKVTRKDVEAFLLSNGCIERGDVVSGVDATIKSALTSKHDFRSLLERKVLTEDEVERIIEHLTYTEDRTRSRRWLQEQFPQLAAQDIQYVAKLKYKEFGRLSQEFLAGLQGVDKETGEQNSILGFLWGTNDNLMQLLSDRYTFADEIERRQKEYYKESGARLEDILDDMRVSSLVKRPIYRTLDIVRDVCKVCKEPPEKIFLEMARGTKVKEGRKVSRRERLQALYKEIKTKDCAEVDRMVTELQGKTDRQLRSDALYLYFVQLGKDMYSGKPIDLEHIKDRTRYDIDHIFPQSVVKDDSLDNRVLTATEINSQKGNRYPLNPEIRSRMIPFWKMLKEKGLISEGKYNRLTRMTPFTADERWGFINRQLVETSQSTKALATILQRKFPKAKIVYVKAGLVSDFRREYDLVKSRLVNDLHHAKDAYLNIVVGNVYDTRFNRQWFRVEEPYSVKLKTLFKHPVQARKNSPVVWNGETDIGRIKKIVAKNNAHYTRYAFVRKGGFYDQMPVRAKTGLIPLKKGLETEKYGGYNKATASFYCFVVFDMVERKSAKREGMLVPVSLHEAVLVEKDRAYAEEYLRNTIAQIIKKTPDCIQHVMFPLGLRKIKINTVLSLDGFQVSIAGKSNGGEYFLAPSLMPLSVTREQEEYVKCLESFRKKMEGNKEITIDEQYDKITKQQNVELYDFFVEKLQNFPYATFLLLKRATKTLVAGRHMFLSMATQEQVSTLLNVLDLFTTGRTTGCDLRNVGGVEHAAAVPMAAKFSGYKGKYKAVRIVNVSASGLFQSESKNLLEYL

SEQ ID NO: 1095 - protein, 1360 aa, synthetic construct
  REGION 1..1360: note = MG46-199 effector
MGKEYYLGLDVGTNSVGYAVTDRDYRLMKFKGEPMWGSHVFDDGSNSDSRRGFRTARRRLARRKQRVELVREIFAPEIAKVDERFFIRLKEAALWRDDVAATDKHILFCDKDFTDKDYFHQYPTIHHLIYELMSSNAPHDVRLVYLAVAWLVAHRGHFLNEMKKDDVESVLRFDTIYADVRQYMRQNDMSEWQEDQADALQTLLPRRQNITAKEKALIEILYEGKKPKAIDEELINLAMSVKLLAGGSVKAAKLFPEGGYDDSISLSFADKEENFVTAVAQLNEEAQWVLLLRRMYDWALLKDAIKDGDSVSAGKVKVYEQHRRDLRGLKSFIRKYMPKKYGEIFRRVESNNYVSYSYNVKSVKGDISKIKKATAVDFCDYLRKQVKDIKVEAVDQSFYEDMLARLEAHTFMPKQVNGENRVIPYQLYYHELVCLLNKAESYLPFLQAKDKDGVSNRDKLLSIFTFRIPYFVGPLNEKSAFSWIKRRGEGKIYPWNFAQQVDLDKSEEAFIRRMTNKCTYMPGEDVLPLNSLLYQRYMVLNEINPLKVNGRPIDVAAKQTVYELFMQKRRVTSKDIAKCLHDNGYMQKEDILSGVDKNLNASLKSYHDFRSLLERGVLTTNDVERIIERLTYSEDKRRMYNYLAQEFPQLEEADRKYVAKLKYADFGRFSKKFLMGFKGVNKKTRENATIMDFLWETNDNLMQLLAQDSYTFNAELEALRKEYYASGDQSLTEMLDDMRIANSVRRSIYRTLDIVKDVCKAQGNPPQRIFLEMARGGGEKGVRTVSRREQIQKLYKEVDKEYANDVKILSAKLASVSDNRLQSEVLYLYFLQLGRSMYSGQPINIENLKDSTLYNVDHIYPRCYVKDDSLDNKVLVTSNENGTKGDSYPIKGEIRKKMAGLWKKYLQCGLISEKKYNRLIRSTAFSDDERMGFIQRQLVETRQSTKALAEIFKSWYPDTELIYVKAGLVSDFRHEFNMLKCRSINDLHHAKDAYLNIVVGNVYHSKFNRKWFKPSDTYSLKTSTLFGREVKAAGSQIVWHGGEDIGRVRQVLQKNNIHYTRYAFERHGGLFDQMPVKKGSGLVPRKAGLETNKYGGYNKTTASYYLLARYVLAGKKPQADVMFVPVTLLADSQIKSQQLSVTDYIQRAIAEIIGKDINLVTEITLPLGERHVKINAVLDVAGIKSCIAGKDSGGKNVLLKSMVSLILPAEMELYVKKLESFNRKRTDNKKLEVNTQYDGINGEENERLYQIFMEKMVSTPYMKIGIIAKLYEVLDNCKEKFVSLTLTEQVSALLAILNVFQVGRSSACDLSIIGGDKSAALYRLSSKLSNWKKNVNVVRLLDVSPSGLYVSKSPNLLEFL

SEQ ID NO: 1096 - protein, 637 aa, synthetic construct
  REGION 1..637: note = MG46-200 effector
KIQQDNAGQSLSVLMDDLRLSGAVRRPVYRTLDIVHDVAKTLKHPPKKIFIEMARGGGEKGKRTVSRRNKIEALYKSLGKDFNDEVRELSELLAKKSDNELQREVLYLYFTQLGKDMYSGEPINIENLNNETLYNVDHIFPRSIVKDDSLDNKVLVSSKANGAKGDDYPIKKEIRDKMANLWASYEKKGLISKKKYERLIRSTPFSEEELWGFIDRQLVETRQSTKALATLLQRKYPESKIVYVKAGLTSEFRHEFGLVKSRLINDLHHAKDAYLNIVTGNVYSERFNRSWFLPEKRTYTLKTRELFSKPVTVLKKTIWQGADDIGKVKKYMGKNAVHYTRFATVSKGGFFDQNPVKAQNGLKPRKTGLNPEKYGGYNKSSVAYYVLAKYVFKNKADIMFVPVEIMEAAKVGISKDYAAEYLHVMIAQILGKEKNEVNGVELLLNGRAIKISSVFSFDGFRAALCGKANNGKIVLWTSMIPLCTTPDKEQYIKHLESFANKYKENKNLHISEKYDKITSSDNMSCYRFLKEKITSTPFVKAAFSSSAGKIIKDGELKFKGLSLEEQTLGLLNLLNIFKTGRKGGCDLSFIGGGTKAASFTSSSKLSNFAKSYKDVRLLELSSSGLHEKQSQNLMDLL

SEQ ID NO: 1097 - protein, 1093 aa, synthetic construct
  REGION 1..1093: note = MG46-201 effector
CFADKEENFVTAVAQLNEDAQWVLLLRRMYDWALLKDALKDGDSVSAGKVKVYEQHRRDLHGLKLFVRKYLPRRYGEIFRRIESNNYVAYSYNVKSVKGDISKVKKATAVDFCDYLRKQVKEIKVEAADQTFYEDMLNRLEAHTFMPKQVNGENRVIPYQLYYHELVCLLNRAEKYLPFLQEKDMDGVSNRDKLISIFTFRIPYFVGPLNKESAFSWFKRRAEGKIYPWNFAQQIDLDKSEEAFIRRMTNKCTYIPGADVLPLNSMLYQRYMVLNEINPLKVNGRPIDVTAKQMVYDLFVQKRRVTSKAIAKCLHDNGYMQKDDILSGVDKNLNASLKSYHDFNSLLERKVLTTNDVERIIERLTYSEDKRRMNNYLAREFPQLDESDRKYVAKLKYADFGRLSKKFLVGFKGINKKTGENATIMDFLWETNDNLMQLLAEDSYTFYTELEAIRKEYYASGEGHLSEMLDDMRIANSVRRSIYRTLDIVKDVCKAQGNPPKKIFLEMARGGGDKGVRTVSRREQIQKLYKEIDKEYANDVKVLSAKLASVSDNRLQSEVLYLYFLQLGRSMYSGQPINIENLKDTTLYNVDHIYPRCFVKDDSLDNKVLVTSNENGAKGDSFPIKDEIRKKMAGLWKKYLQCGLISEKKYNRLMRSTAFSDDERMGFIQRQLVETRQSTKALAAIFKRWYPDTELIYVKAGLVSDFRHEFNMLKCRSINDLHHAKDAYLNIVVGNVYHSKFNRQWFKPSDTYSLKTSTLFGREVKAGSQLVWHGSDDIGRVQQVLQKNNIHYTKYAYKKHGELFKQQPLRKNSGLFPRKGGLDTKKYGGYTGVTTTYFLLVRYVINEKKTKPELMLLPVTLIDDFRIKNNLISDTDYVKMSIAQITGKDIGMVSDITYPVGLRPIKINGTLMIDGFRVCIAGKSDDNVILKSFMPLIASKDIENYLKKLESFKRKWNINSDLEVNPKYDDITYDKNSELYNWFMDKMTSNPYKKLDILAKFPELMVKNKNKFLSLSLKEQITVLLSIMSLFQIGKTSEFKYDVTLIGGDKSMPKFRKSIKFSNWKKFARDVRIMDISASGLYVSKSPNLLEFL

SEQ ID NO: 1098 - protein, 1371 aa, synthetic construct
  REGION 1..1371: note = MG46-202 effector
MVTDLGGFVKMGYYLGLDVGTNSVGYAVTDEQYRLRKFHGNPMWGSHVFEEAKPAAERRGFRTARRRLNRRQQRVQLVQDIFAREIAKVDSRFFIRRQQSRLHRDDVEAGDRNLLFNDVTFTDKEYYANYPTIHHLLLELMQSDAPHDVRLVYLAVAWLVAHRGHFLSEVDKDNVEAVLRFDEVYQDFQDVLGMYGLDPWTCDEKKLQSVLLQRKRIKEQQKDLEMLVYPGQKLKAGEEDRVDKKLLLNLLAGGTVSLEKLFPQLTLEENKKLCFQDSEDKVEEALQVLDEQADLVIQLRRLYDWALLKHSLQGSLFVSEAKVKIYEQHRKDLADLKDFVRRCAPKQYNRIFRTMDGKDTLANYVAYSYELSNVKGRILPKKKATQAEFCDFLKKELENVSCSGADKTLYDSMKARWEDHTFLPKQVNGDNRIIPYQLYYHELKMILQKAEKYLPFLAVKDSDGMTAKEKLLSIMTFRIPYFVGPLCKAHSHIAWIERKADGKIYPWNFDQMVDLDASEAAFVRKMTNMCTYLPDQPVLPMQSLLYERFVVLNEINNLKVNGVPISVEAKQGIYGLFTQKRKVTRKDVEAFLLSNGWIERGDVVSGVDATIKSALTSKHDFRSLLERKVLTEDEVERIIEHLTYTEDRTRSRRWLQEQFPQLAAQDIQYVAKLKYKEFGRLSQEFLAGLQGVDKETGEQNSILGFLWGTNDNLMQLLSDRYTFADEIERRQKEYYKESGARLEDILDDMRVSSLVKRPIYRTLDIVRDVCKVCKEPPEKIFLEMARGTKVKEGRKVSRRERLQALYKEIKTKDCAEVDRMVTELQGKTDRQLRSDALYLYFVQLGKDMYSGKPIDLEHIKDRTRYDIDHIFPQSVVKDDSLDNRVLTATEINSQKGNRYPLNPEIRSRMIPFWKMLKEKGLISEGKYNRLTRMTPFTADERWGFINRQLVETSQSTKALATILQRKFPKAKIVYVKAGLVSDFRREYDLVKSRLVNDLHHAKDAYLNIVVGNVYDTRFNRQWFRVEEPYSVKLKTLFKHPVQARKNSPVVWNGETDIGRIKKIVAKNNAHYTRYAFVRKGGFYDQMPVRAKTGLIPLKKGLETEKYGGYNKATASFYCFVVFDMVERKSAKREGMLVPVSLHEAVLVEKDRAYAEEYLRNTIAQIIKKTPDCIQHVMFPLGLRKIKINTVLSLDGFQVALAGKDSGGSRFLAPSLVPLGMTREQERYVKRLESFRKKREENEDVALDEQYDGITREENIDLYDFFILKLKNRPYSGFQLLKTPLNTLVDGRRNFLSLTVEEQVPTLLNVLNLFTTGRTTGCDLRSVGGVEHAAAVPMAAKFSGYKYKTVRIVDVSASGLFQSESKNLLEYL

SEQ ID NO: 1099 - protein, 1359 aa, synthetic construct
  REGION 1..1359: note = MG46-203 effector
MGKDYYLGLDVGTNSVGYAVTDSNYKLIKFKGEPMWGSHVFDDGSNSDSRRAFRTARRRLARRKQRVELVREIFASEIAKVDERFFIRLKEAALWRDDVAATDQHILFCDKRFTDKDYFHQYPTIHHLIYELMNSEAPHDVRLVYLAVAWLVAHRGHFLNEMKKDDVESVLKFDTIYAEVRQYMRQNDMSEWQEEKSDALQELLPQRQNITTKEKALIEILYEGKKPKTADEELINLAMSLKLLAGGKVNAVKLFPQSGYDDSISLCFADKEENFVSAVAQLNEEAQWVLLLRRMYDWALLKDALKDGDSVSAGKVKIYEQHHRDLHGLKLFIRKYMPDKYGEIFRRIESNNYVAYSYNVKSVKGDIAKVKKASAVDFCDYLRRKVKDIKVEAVDQFFYEDMLARLEAHTFMPKQVNGENRVIPYQLYYHELVCLLNKAEQYLPFLQATDHDGISNRDKLLSIFTFRIPYFVGPLNKDSSFSWLKRRGKGKIYPWNFAQQVDLDKSEEAFIRRMTNKCTYMPGEDVLPLNSLIYQRYMVLNEINPLKVNGRPIDVAAKQKVYELFVQKRRVTSKAIAKCLHDNGYMQKDDILSGVDKNLNASLKSYHDFNSLLERKVLTTNDVERIIERLTYSEDKKRMYNYLAQEFPQLEESDRKYVAKLKYADFGRLSKKFLMGFKGVNKNTGETATIMDFLWETNDNLMQLLAQDSYTFNAELEALRKEYYASGEQSLTEMLDDMRIANSVRRSIYRTLDIVKDVCKAKGNPPKKIFLEMARGGGEKGVRTVSRREQIQKLYKEVDKEYANDVKELSAKLSSISDNRLQSEVLYLYFLQLGRSMYSGQPINIENLKDSTLYNVDHIYPRCFVKDDSLDNKVLVTSNENGNKGDSYPIKEEIRRKMAGLWKKYLQCGLISEKKYNRLIRSTAFSDDERMGFIQRQLVETRQSTKALAEIFKKWYPDTELIYVKAGLVSDFRHEFNMLKCRSINDLHHAKDAYLNIVVGNVYHSRFNRQWFNPSDTYSIKTGTLFGHEVKAGAQIVWHGSEDIGRVRQVLQKNNIHYTRYAFERHGGLFDQMPVKKGSGLVPRKAGLDTEKYGGYNKTTASYYLLARYVLAGKKSQADVIFVPVTLLADSQIKSKQLSVIAYVQKTIAEIIGKDISLVTEITLPLGIRHIKINAVLDVAGIKACIAGKDSGGKNILLKSMMSLILPLEMELYIKKLENFKRKQADNKKLEVNMQYDGINVEENQRLYLIFMEKMVSAPYMKIGIIAKLHEELEKCKDKFASLSLTEQVSALLAILSVFQAGRSSACDLSIIGGDKSAALYRLSSKLSNWKKNANIVRLLDVSASGLYVSKSPNLLEFL

SEQ ID NO: 1100 - protein, 1373 aa, synthetic construct
  REGION 1..1373: note = MG46-204 effector
MVTDLGGFVKMGYYLGLDVGTNSVGYAVTDEQYRLRKFHGNPMWGSHVFEEAKPAAERRGFRTARRRLNRRQQRVQLVQDIFAREIAKVDSRFFIRRQQSRLHRDDVEAGDRNLLFNDVTFTDKEYYANYPTIHHLLLELMQSDAPHDVRLVYLAVAWLVAHRGHFLSEVDKDNVEAVLRFDEVYKDFQDVLGMYGLDPWTCDEKKLQSVLLQRKRIKEQQKDLEMLIYPGQKLKAGEEDRVDKKLLLNLLAGGTVSLEKLFPQLTLEENKKLCFQDSEDKVEEALQVLDEQADLVIQLRRLYDWALLKHSLQGSLFVSEAKVKIYEQHRKDLADLKDFVRRCAPKQYNRIFRTMDGKDTLANYVAYSYELSNVKGRILPKKRATQAEFCDFLKKELENVSCSGADKTLYDSMKARWEDHTFLPKQVNGDNRIIPYQLYYHELKMILQKAEKYLPFLTVKDSDGMTAKEKLLSIMTFRIPYFVGPLCKAHSHIAWIERKADGKIYPWNFDQMVDLDASEAAFVRKMTNMCTYLPDQPVLPMQSLLYERFVVLNEINNLKVNGVPISVEAKQGIYGLFTQKRKVTRKDVEAFLLSNGCIERGDVVSGVDATIKSALTSKHDFRSLLERKVLTEDEVERIIEHLTYTEDRTRSRRWLQEQFPQLAAQDIQYVAKLKYKEFGRLSQEFLAGLQGVDKETGEQNSILGFLWGTNDNLMQLLSDRYTFADEIERRQKEYYKESGARLEDILDDMRVSSLVKRPIYRTLDIVRDVCKVCKEPPEKIFLEMARGTKVKEGRKVSRRERLQALYKEIKTKDCAEVDRMVTELQGKTDRQLRSDALYLYFVQLGKDMYSGKPIDLEHIKDRTRYDIDHIFPQSVVKDDSLDNRVLTATEINGKKGNRYPLDSEIQHRMAPFWKMLKEKGLISEGKYNRLMRTTPFTSDERWGFINRQLVETSQSTKALATILQRKFPKAKIVYVKAGLISDFRREYDLVKSRLINDLHHAKDAYLNIVVGNVYDTRFNKQWFRVEEPYSIKLKSLFKHPVQARKNSPVVWNGEADIGRIKKTVAKNNVHYTRYAFVRKGGFYDQMPVRAKTGLIPLKKGLETEKYGGYNKSTASFYCFAVFDMLEKKSTKREAMLVPVALHEAVFVEKDKTYAEEYLRNTIAQIINKTPDCIQNIEFPLGLRKIKINTVLSLDGFQVSIAGKSNGGEYFLAPSLMPLSVTREQEEYVKCLESFRKKMEGNKEITIDEQYDKITKQQNVELYDFFVEKLQNFPYATFLLLKRATKTLVAGRHMFLSMATQEQVSTLLNVLDLFTTGRTTGCDLRNVGGVEHAAAVPMAAKFSGYKGKYKAVRIVNVSASGLFQSESKNLLEYL

SEQ ID NO: 1101 - protein, 1360 aa, synthetic construct
  REGION 1..1360: note = MG46-205 effector
MKNEYYLGLDVGTNSVGYAVTDKEYKLIKFKGEPMWGSHVFEEGKNSNERRGFRTARRRLARRKQRVNLVNEIFAPEIAQLDKRFFIRLREAALWREDVASTDKHILFCDKAFSDKDYFHKYPTIHHLICELMASDAPHDVRLVYLAVVWLVAHRGHFLNEMNKDDVEAVLRFDSIYADVRQYMQNNELNTWAEEKAIELQKILPQRQNKSHKEKALLDILYDGKKPKSSDDDFVDMALSVKLLAGEKVTAAKLFPQAGYDDSIKLSFADKEESFLEAIAQLDEDVKWVLLLRRMYDWALLKDAVKDGDSVSAGKVKIYEQHRRDLRGLKQFVKKYVPEKYSKIFRQVQTGSNYVAYSYNVKSVKGDIAKLKKAKADDFCDYLRKELKDITVEPVDKAFYDDMLARLDTKTFMPKQVNGENRVIPYQLYYHELLSILNRAEKYLPFLQEKDKDGYTNKAKLLSIFTFRIPYFVGPLNDKSNYGWIVRKAEGKIRPWNFAEQVDFDKSEEKFIRRMTNKCTYLPGEDVLPLNSLLYQRYMVLNEINPLKVNGNPIDVAAKQKVYKLFEQKRRVTSKAIAECLTSNGYMAKGDILSGVDKNLHASLKSYHDFHSLLERKVLTEQEVEQIIERLTYSEDKKRVSEYLSRAYPQLEEPDRKYIAKLKYDDFGRLSKKLLVGVKGIEKQSGETASIMDFLWETNDNLMQILAGDKYTFIDSIDALRKEYYSRGEQNLTEMLDDMRIANSVRRSIYRTLDIVKDVCKAQGRPPKKIFLEMARGGGVKGARTISRRDKITELYKSLDKEYANEVRELSAKLESVSDNRLQSEVLYLYFLQLGRSMYSGEKINIDNLKDDKLYNVDHIYPQCYVKDDSLDNKVLVTSTENGAKGENYPIKGEIRSKMAGLWKKYFQCGLISEKKYTRLMRSTRFSDEERMGFIQRQLVETRQSTKALAGIFKSWYPATELVYVKAGLVSDFRHEFDMLKCRSINDLHHAKDAYLNIVVGNVYNVRFNRQWFKPQESYSIKTKALFGHEVKQGKLVVWHGGEDIDRIRQVMRKNNIHYTRYAFERRGGLFDQMPIKKGNGLVPRKAGLDTEKYGGYNKTTASYYILARYVLAGKKPQADVMFVPVTLLADGQIKAQRLVIKDYIQKAIADIIGKDSSLVTEVTLPLGARHIKINTVIDIAGFKSCIAGKDSGGKNILLKSLMPLVLSHDMEIYVKKLESFVRKREVNRKLEVNEQYDGINYEENENLYELFMNKMANSPYNKVGIIAKLYDVLKNCKYKFTGLSLTEQTAALLAILSVFQTGRSSACDLSIIGGDKAAALYRLSAKLSNWKKTANDVHLMDMSASGLFVSKSANLLEFL

SEQ ID NO: 1102 - protein, 1358 aa, synthetic construct
  REGION 1..1358: note = MG46-206 effector
MGKDYYLGLDVGTNSVGYAVTDRDYKLMKFKGEPMWGSHVFDDGSNSDSRRAFRTARRRLARRKQRVELVREIFASEIAKVDERFFIRLKEAALWRDDVAVTDQHILFCDKRFTDKDYFHQYPTIHHLIYELMNNEAPHDVRLVYLAVAWLVAHRGHFLNEMKKDDVESVLKFDTIYAEVRQYMRQNDMSEWQEEKSDALQELLPQRQNITTKEKALIEILYEGKKPKTADEELINLAMSLKLLAGGKVNAVKLFPQSGYDDSISLCFADKEENFVSAVAQLNEEAQWVLLLRRMYDWALLKDALKDGDSVSAGKVKIYEQHHRDLHGLKLFIRKYMPDKYGEIFRRIESNNYVAYSYNVKSVKGDIAKVKKASAVDFCDYLRRKVKDIKVEAVDQFFYEDMLARLEAHTFMPKQVNGENRVIPYQLYYHELVCLLNKAEQYLPFLQATDHDGISNRDKLLSIFTFRIPYFVGPLNKDSSFSWLKRRGEGKIYPWNFAQQVDLDKSEEAFIRRMTNKCTYMPGEDVLPLNALIYQRYMVLNEINPLKVNGRPIDVAAKQKVYELFVQKRRVTSKAIAKCLHDNGYMQKDDILSGVDKNLNASLKSYHDFNSLLERKVLTTNDVERIIERLTYSEDKKRMYNYLAQEFPQLEESDRKYVAKLKYADFGRLSKKFLMGFKGVNKNTGETATIMDFLWETNDNLMQLLAQDRYTFNAELEALRKEYYASGEQSLTEMLDDMRIANSVRRSIYRTLDIVKDVCKAKGNPPKKIFLEMARGGGEKGVRTVSRREQIQKLYKEVDKEYANDVKELSAKLSSISDNRLQSEVLYLYFLQLGRSMYSGQPINIENLKDSTLYNVDHIYPRCFVKDDSLDNKVLVTSNENGNKGDSYPIKEEIRRKMAGLWKKYLQCGLISEKKYNRLIRSTAFSDDERMGFIQRQLVETRQSTKALAEIFKKWYPDTELIYVKAGLVSDFRHEFNMLKCRSINDLHHAKDAYLNIVVGNVYHSRFNRQWFNPSDTYSIKTGTLFGHEVKAGAQIVWHGSEDIGRVRQVLQKNNIHYTRYAFERHGGLFDQMPVKKGSGLVPRKAGLDTEKYGGYNKTTASYYLLARYVLAGKSQADVIFVPVTLLADSQIKSKQLSVIAYVQKTIAEIIGKDISLVTEITLPLGIRHIKINAVLDVAGIKACIAGKDSGGKNILLKSMMSLILPLEMELYIKKLENFKRKQADNKKLEVNMQYDGINVEENQRLYLIFMEKMVSAPYMKIGIIAKLHEELEKCKDKFASLSLTEQVSALLAILSVFQAGRSSACDLSIIGGDKSAALYRLSSKLSNWKKNANIVRLLDVSASGLYVSKSPNLLEFL

SEQ ID NO: 1103 - protein, 538 aa, synthetic construct
  REGION 1..538: note = MG46-207 effector
ALYLYFVQLGKDMYSGKPIDLEHIKDRTRYDIDHIFPQSVVKDDSLDNRVLTATEINGKKGNRYPLDSEIQHRMAPFWKMLKEKGLISEGKYNRLMRTTPFTSDERWGFINRQLVETSQSTKALATILQRKFPKAKIVYVKAGLISDFRREYDLVKSRLINDLHHAKDAYLNIVVGNVYDTRFNKQWFRVEEPYSIKLKSLFKHPVQARKNSPVVWNGEADIGRIKKTVAKNNVHYTRYAFVRKGGFYDQMPVRAKTGLIPLKKGLETEKYGGYNKSTASFYCFAVFDMLEKKSTKREAMLVPVALHEAVFVEKDKTYAEEYLRNTIAQIINKTPDCIQNIEFPLGLRKIKINTVLSLDGFQVSIAGKSNGGEYFLAPSLMPLSVTREQEEYVKCLESFRKKMEGNKEITIDEQYDKITKQQNVELYDFFVEKLQNFPYATFLLLKRATKTLVAGRHMFLSMATQEQVSTLLNVLDLFTTGRTTGCDLRNVGGVEHAAAVPMAAKFSGYKGKYKAVRIVNVSASGLFQSESKNLLEYL

SEQ ID NO: 1104 - protein, 970 aa, synthetic construct
  REGION 1..970: note = MG46-208 effector
GEDKALYESMKPRWEDHTFLPKQVNGDNRIIPYQLYYHELKTLLEKAESYLPFLSVEDADGLTPEKKLLSIMTFRIPYFVGPLCKSYSDIAWIERKAEGKIYPWNFDEKVDLDASEAAFIRKMTNKCTYLPDQPVLPMQSLLYERFMVLNEINNLKVNGMPITVGAKQDIYQLFTQKRKVTRKAVEAFLLSNGWMERGDIVSGVDVTIKSGLTSLHDFRSLLERKVLTQDEVEEIVEHLTYTEDRKRNQQWLQEKFPQLNEQDVKYVSKLKYEEFGRLSREFLSGIQGVDRETGEKNSIIGFLWGTNDNLMQLLSDRYTFADEVERRQTEYYKESGDRLEDLLDDMQVSSLVKRPIYRTLDIVRDVCKACKEAPEKIFVEMARGTKVKQERKKSRRDMLKELYKEVKTKDCAEVDRMVSELEGKSDRQLRSDALYLYFVQLGKDMYSGDPIDLENIKDRKRYDIDHIYPQSVVKDDSLDNRVLTATEINGQKGNRYPLDPAIQHRMAPFWKMLKEKGLISEKKYNRLMRTSPFTPDERWGFINRQLVETSQATKALATVLQRKFPQAKIVYVKAGLVSDFRHEYDLVKSRLVNDLHHAKDAYLNIVVGNVYDTRFNKKWIRVDEPYSVKLQTLFKHPVQARKNSPVVWNGEEDIGRIKETVAQNNVHYTRYAFVRKGGFYDQMPLKAAPNLIPLKKGLEPGKYGGYNRATASFYCFVAFDIVDKKSTKREAMLVPVSLHEAVFVENNKTYAEEYLRNTIAQIINQKPDCIQKMVFPLGMRKLKINTVLSLDGFRVALAGKDSGGSRFLAPSLMPLCVTREQEQYIKRLESFRKKMESNQGITVDERYDGITQGKNTDLYDFFVAKLQQRPYVTFRLLKNPLETLLSGRATFLALSTEAQVPALLNILDIFTTGRTTGCDLSSIGGAERAVAVPMAAKFSGYKGKYKAIRIVNVSASGLFESKSKNLLEYL

SEQ ID NO: 1105 - protein, 1362 aa, synthetic construct
  REGION 1..1362: note = MG71-27 effector
MRKRFGDYYLGFDIGTGSVGWAATDRSYKLLKFNGKATWGIRLFDTASTAEATRSFRTTRRNLERKSWRLGMLQELFAEEIAKVDRGFFQRLKESNLHPLDQQATHKDRYTLFNDKKYTDKEYYAEYPTIYHLRKALRESRAGLDIRLLYLAVQNILKHRGHFLFAGIDAGKVTDFKSVFAGLEEVLKESLGLEGWCCSDLEQLEAVLKNKNLNISNKKKELEKLLPNKGKQEKAIIAFLNGSKGKLSELFYDWEKEEPDAELAAFEKNSFSMADGNFEELYPLLEEVLKENIIVVEALKAVYDWSILVNILQGEQYLSNAKVKAFAEHRQDLTELKTILTSTCPDEESYKKIFKSQDKEAYEAYAKGVNGYGQSDFCKNVLKTLTKSKNKKLQAMAKGEKASEAGGEPQGVIERLMKGIAFPKPTGKENSVIPLQVQLVELKAILENQAQYHEFLNAADEQGMPIKEKIIDIVKFRVPYYVGPLAGTELSRAKGRCWSVRKNSDKIYPWNFEQVIDTAASAEAFITKMTSKCTYLIGEDVLPKASLLYSEFVTRNEFNNLSLDGERMKPELINMLYEELLVQPKGNGKITRKKLAECLQAHNIPFTIIGGVDDAIKNNLRSFKDFREIFGEAYVFQHKEQIENIIKWITLFGESKQLLKEKITSSYPEIKNEQIKQILKLKYKDWGRLSEKLLCSSEIAHIDESTGEFTTIISAMRKTNKNLMELLGAADEHGFAECISRFNGLQRSEEGFNEKMLEELYVSPAVKRSIWQTYSIMKELAKVFGHEPARVFIETTREPNAEKKRTTSRLQRLKDLYNSCRGEEAKELLQALEAKSEEDLRSDRLYLYYTQMGKCMYSGEPISLAALYDKNTYDVDHIFPQSKTKDDSLENRVLVRKDLNLKKSDEYPLSSGIQAKMQSYWKMLLDKGLIGRKKYERLTRRTSLTKEELAGFISRQLVETSQSTKAVAEVIKQVWPKTEVVYVKAKNVSEFRQEFNMLKCRSVNDLHHAKDAYLNIVVGNVYHTKFTKNPLNYIKNMRPEDKYTLNTKKLYNYPIEREGITAWVPGEEGSMKQVQGVMQKNNILFTRHQVVNKGQLYKLQLVKAGEAQVPAKKGRNVDLYGGYNAASTAYFALVESIGKKGSILRTLESISIMADNNSKKDPMAISQYLEEVCKLKSPKILIPKIKKYALINLDGCMLHITGKSGDSITAKVATQLVLGYEWECYFKRVTKFIQRYTESKGAALITAWDEITKEKNLELYHYLIYKHECNAYKNRPSKQIATLKNGEPAFRDLSVEKQCIILGSILELFQCAAVRVNLEDIGGSKNAGTITVGKDITNRDCLRLINQSITGLFEQEVNLLQS

SEQ ID NO: 1106 - protein, 1353 aa, synthetic construct; identical to SEQ ID NO: 284
  REGION 1..1353: note = MG72-13 effector

SEQ ID NO: 1107 - protein, 1370 aa, synthetic construct
  REGION 1..1370: note = MG72-14 effector
MSKKFAGEYYLGLDIGTDSVGWAVTDNQYNVLKFNGKSMWGIRLFDAAQTAAERRMFRTARRRVERRRWRLELLQELFQNEIEKKDPDFFQRMKDSALYPEDSKTGKPFALFCDKDLNDKLYYKQYPTIYHLRKALLTENSKFDIRLVYLAIHHILKHRGHFLFNGDFSNVTRFSFAFEQLQTCLCNELDMDFECNNVQKLSEILKDTHMSKNDKVKASVALFENSGDKKQLQAVIGLFCGAKKKLADVFLDETLNDTEMPSISIADKPYEELRPELESILAEKCCVIDYIKAVYDWAILADMLDGGEYGNRTYISVARVRQYEKHHDDLKKLKKLVCLYCKSEYKSFFSVAGTDNYCAYIGDDIETDDRKSVKKCKQEDFYKRIKGLLKKAIENGCPKDEVAEIIKDIDAQVFLPLQVTKDNGVIPHQVHEMELKQILKNAEKYYPFLCKKDEEGIVTSNKILQLFKFRIPYYVGPLNSRIGKNSWIVRRAEGKIYPWNFEEKVDFDKSEEGFIRRMTNPCTYMAGADVLPKYSLLYSEFMVLNELNNVRICGDKLSVEIKQTIIKDLFQRTRRVTVRKLCDKLKAEGVISRNSNQKDIDIKGIDQDLKSSMVSYIDFKNIFGKEIEKYSVQQMCERIIFLLTIHHDDKRRLQKRIRAEFTETQITDDQLQKVLRLNYQGWGRFSAEFLKELKGVDTETGEVFSIINALRKTDDNLMQLLSNRYTFSEELEKYNSNKRKKIEALTYDNIMEGIVASPAIKRSAWQAISIVMELSKIMGREPKRIFVEMARGPEEKKHTISRKNQLLELYKSVKDESRDWKTELETKTESDFRSIKLFLYYTQMGRCMYTGEPIDLDQLANTTIYDRDHIYPQSLTKDDSLNNLVLVKKVENVNKGNGLISADIQKKMRGFWAELKKKGLISDEKFSRLTRTTPLSDDELAGFINRQLVETRQSSKIVADLFHQLYPTTQVVYVKAKIVSDFRHETLDMVKVRSLNDLHHAKDAYLNIVTGNVYYEKFSGNPLTWLRKNPDRNYSLNQMFNYDIVKKTKEGTSYVWKKGKDGSIAVVRRTMERNDILYTRQATENKNGGLFDQNIVSSKNKPFIPVKKGLDVNKYGGYKGITPAYFALIEFTDKKGSRQRLLEAVPLYLRADIDNDSNVLRDFYKNVLGLENPVVILNRIKKNSLLKINGFLIHLRGTTGFSASQLKVQNAVEFSLPHHMEDYVKKLENYEIHIIAERGSTKNSQIKITEWDGISKEKNLQLYDMFINKMENTIYKFRPANQVSNLKENREVFNSLAVEDQCSVLNQILMLFVCKPVTANLSLIKGSKNAGNMALSKIISNMRSAYLIHQSVTGLFEQKIDLLKVSSQKD

SEQ ID NO: 1108 - protein, 722 aa, synthetic construct
  REGION 1..722: note = MG72-15 effector
DKRRLQKRIRAKFTETQITDDHLQKVLRLNYQGWGRFSAEFLKELKGVDTETGEVFSIINALRETDDNLMQLLSNRYTFAEELEKYNSNKRKKIEALTYDNIMEGIVASPAIKRSAWQAISIVMELSKIMGREPKRIFVEMARGPEEKKHTISRKNQLLELYKSVKDESRDWKTELETKTESDFRSIKLFLYYTQMGRCMYTGEPIDLDQLANTTIYDRDHIYPQSLTKDDSLNNLVLVKKVENANKGNGLISADIQKKMRGFWAELKKKGLISDEKFSRLTRTTPLSDDELAGFINRQLVETRQSSKIVADLFHQLYPTTQVVYVKAKIVSDFRHETLDMVKVRSLNDLHHAKDAYLNIVTGNVYYEKFSGNPLTWLRKNPDRNYSLNQMFNYDIVKKTKEGTSYVWKRGKDGSIAVVRRTMERNDILYTRQATENKNGGLFDQNIVSSKNKPFIPVKKGLDVNKYGGYKGITPAYFALIEFTDKKGSRQRLLEAVPLYLRADIDNDSNVLRDFYKNVLGLENPVVILNRIKKNSLLKINGFLIHLRGTTGFSASQLKVQNAVEFSLPHHMEDYVKKLENYEKHIIAERGSTKNSQIKITEWDGISKEKNLQLYDMFINKMENTIYKFRPANQVSNLKENREVFNSLAVEDQCSVLNQVLMLFVCKPVTANLSLIKGSKNAGNMALSKIISNMRSAYLIHQSVTGLFEQKIDLLKVSSQKD

SEQ ID NO: 1109 - protein, 1370 aa, synthetic construct
  REGION 1..1370: note = MG72-16 effector
MSKKFAGEYYLGLDIGTDSVGWAVADNQYNVLKFNGKSMWGIRLFDAAQTAAERRMFRTARRRVERRRWRLELLQELFQNEIEKKDPDFFQRMKDSALYPEDSKTGKPFALFCDKDLNDKLYYKQYPTIYHLRKALLTENSKFDIRLVYLAIHHILKHRGHFLFNGDFSNVTRFSFAFEQLQTCLCNELDMDFECNNVQKLSEILKDTHMSKNDKVKASVALFENSGDKKQLQAVIGLFCGAKKKLADVFLDETLNDTEMPSISIADKPYEELRPELESILAEKCCVIDYIKAVYDWAILADMLDGGEYGNRTYISVARVRQYEKHHDDLKKLKKLVRLYCKSEYKSFFSVAGTDNYCAYIGDDIETDDRKSVKKCKQEDFYKRIKGLLKKAIENGCPKDEVVEIIKDIDAQVFLPLQVTKDNGVIPHQVHEMELKQILKNAEKYYPFLCKKDEEGIVTSNKILQLFKFRIPYYVGPLNSRIGKNSWIVRRAEGKIYPWNFEEKVDLDKSEEGFIRRMTNPCTYMAGADVLPKYSLLYSEFMVLNELNNVRICGDKLSVEIKQTIIKDLFQRTRRVTVRKLCDKLKAEGVISRNSNQKDIDIKGIDQDLKSSMVSYIDFKNIFGKEIEKYSVQQMCERIIFLLTIHHDDKRRLQKRIRAEFTETQITDDQLQKVLRLNYQGWGRFSAEFLKELKGVDTETGEVFSIINALRKTDDNLMQLLSNRYTFSEELEKYNSNKRKKIEALTYDNIMEGIVASPAIKRSAWQAISIVMELSKIMGREPKRIFVEMARGPEEKKHTISRKNQLLELYKSVKDESRDWKTELETKTESDFRSIKLFLYYTQMGRCMYTGEPIDLDQLANTTIYDRDHIYPQSLTKDDSLNNLVLVKKVENANKGNGLISADIQKKMRGFWAELKKKGLISDEKFSRLTRTTPLSDDELAGFINRQLVETRQSSKIVADLFHQLYPTTQVVYVKAKIVSDFRHETLDMVKVRSLNDLHHAKDAYLNIVTGNVYYEKFSGNPLTWLRKNPDRNYSLNQMFNYDIVKKTKEGTSKVWKKGKDGSIAVVRRTMERNDILYTRQATENKNGGLFDQNIVSSKNKPFIPVKKGLDVNKYGGYKGITPAYFALIEFTDKKGSRQRLLEAVPLYLRADIDNDSNVLRDFYKNVLGLENPVVILNRIKKNSLLKVNGFLIHLRGTTGFSASQLKVQNAVEFSLPHHMEDYVKKLENYEKHIIAERGSKKISQIKITEWDGISKEKNLQLYDMFINKMENTIYKFRPANQVANLKENREVFNLLAVEDQCSVLNQILMLFVCKPVTANLSLIKGSKNAGNMALSKIISNMRSAYLIHQSVTGLFEQKIDLLKVSSQKD

SEQ ID NO: 1110 - protein, 1370 aa, synthetic construct
  REGION 1..1370: note = MG72-17 effector
MSKKFAGEYYLGLDIGTDSVGWAVTDNQYNVLKFNGKSMWGIRLFDAAQTAAERRMFRTARRRVERRRWRLELLQELFQNEIEKKDPDFFQRMKDSALYPEDSKTGKPFALFCDKDLNDKLYYKQYPTIYHLRKALLTENSKFDIRLVYLAIHHILKHRGHFLFNGDFSNVTRFSFAFEQLQTCLCNELDMDFECNNVQKLSEILKDTHMSKNDKVKASVALFENSGDKKQLQAVIGLFCGAKKKLADVFLDETLNDTEMPSISIADKPYEELRPELESILAEKCCVIDYIKAVYDWAILADMLDGGEYGNRTYISVARVRQYEKHHDDLKKLKKLVRLYCKSEYKSFFSVAGIDNYCAYIGDDIETDDRKSVKKCKQEDFYKRIKGLLKKAIENGCPKDEVVEIIKDIDAQVFLPLQVTKDNGVIPHQVHEMELKQILKNAEKYYPFLCKKDEEGIVTSNKILQLFKFRIPYYVGPLNSRIGKNSWIIRRAEGKIYPWNFEEKVDLDKSEEGFIRRMTNPCTYMAGADVLPKYSLLYSEFMVLNELNNVRICGDKLSVEIKQIIIKDLFQRTRRVTVRKLCDKLKAEGVISRNSNQKDIDIKGIDQDLKSSMVSYVDFKNIFGKEIEKYSVQQMCERIIFLLTIHHDDKRRLQKRIRAEFTEAQITDNQLQKVLRLNYQGWGRFSAEFLKELKGVDTETGEVFSIINALRETDDNLMQLLSNRYTFAEELEKYNSNKRKKIEALTYDNIMEGIVASPAIKRSAWQAISIVMELSKIMGREPKRIFVEMARGPEEKKHTISRKNQLLELYKSVKDESRDWKTELETKTESDFRSIKLFLYYTQMGRCMYTGEPIDLDQLANTTIYDRDHIYPQSLTKDDSLNNLVLVKKVENANKGNGLISADIQKKMRGFWAELKKKGLISDEKFSRLTRTTPLSDDELAGFINRQLVETRQSSKIVADLFHQLYPTTQVVYVKAKIVSDFRHETLDMVKVRSLNDLHHAKDAYLNIVTGNVYYEKFSGNPLTWLRKNPDRNYSLNQMFNYDIVKKTKEGTSYVWKKGKDGSIAVVRRTMERNDILYTRQATENKNGGLFDQNIVSSKNKPFIPVKKGLDVNKYGGYKGITPAYFALIEFTDKKGSRQRLLEAVPLYLRADIDNDSNVLRDFYKNVLGLENPVVILNRIKKNSLLKINGFLIHLRGTTGFSASQLKVQNAVEFSLPHHMEDYVKKLENYEKHIIAERGSTKNSQIKITEWDGISKEKNLQLYDMFINKMENTIYKFRPANQVSNLKENREVFNSLAVEDQCSVLNQVLMLFVCKPVTANLSLIKGSKNAGNMALSKIISNMRSAYLIHQSVTGLFEQKIDLLKVSSQKD

SEQ ID NO: 1111 - protein, 1371 aa, synthetic construct
  REGION 1..1371: note = MG72-18 effector
MSKKFAGEYYLGLDIGTDSVGWAVTDNQYNVLKFNGKSMWGIRLFDAAQTAAERRMFRTARRRVERRRWRLELLQELFQNEIEKKDPDFFQRMKDSALYPEDSKTGKPFALFCDKDLNDKLYYKQYPTIYHLRKALLTENSKFDIRLVYLAIHHILKHRGHFLFNGDFSNVTRFSFGFEQLQTCLCNELDMDFECNNVQKLSEILKDTHMSKNDKVKASVALFENSGDKKQLQAVIGLFCGAKKKLADVFLDETLNDTEMPSISIADKPYEELRPELESILAEKCCVIDYIKAVYDWAILADMLDGGEYGNRTYISVARVRQYEKHHDDLKKLKKLVRLYCKSEYKSFFSVAGTDNYCAYIGDDIETDDRKSVKKCKQEDFYKRIKGLLKKAIENGCPKDEVVEIIKDIDAQVFLPLQVTKDNGVIPHQVHEMELKQILKNAEKYYPFLCKKDEEGIVTSNKILQLFKFRIPYYVGPLNSRIGKNSWIVRRAEGKIYPWNFEEKVDFDKSEEGFIRRMTNPCTYMAGADVLPKYSLLYSEFMVLNELNNVRICGDKLSVEIKQTIIKDLFQRTRRVTVRKLCDKLKAEGVISRNSNQKDIDIKGIDQDLKSSMVSYVDFKNIFGKEIEKYSVQQMCERIIFLLTIHHDDKRRLQKRIRAEFTEAQITDDQLQKVLRLNYQGWGRFSAEFLKELKGVDTETGEVFSIINALRETDDNLMQLLSNRYTFAEELEKYNSNKRKKIEALTYDNIMEGIVASPAIKRSAWQAISIVMELSKIMGREPKRIFVEMARGPEEKKHTISRKNQLLELYKSVKDESRDWKTELETKTESDFRSIKLFLYYTQMGRCMYTGEPIDLDQLANTTTIYDRDHIYPQSLTKDDSLNNLVLVKKVENVNKGNGLISADIQKKMRGFWAELKKKGLISDEKFSRLTRTTPLSDDELAGFINRQLVETRQSSKIVADLFHQLYPTTQVVYVKAKIVSDFRHETLDMVKVRSLNDLHHAKDAYLNIVTGNVYYEKFSGNPLTWLRKNPDRNYSLNQMFNYDIVKKTKEGTSYVWKKGKDGSIAVVRRTMERNDILYTRQATENKNGGLFDQNIVSSKNKPFIPVKKGLDVNKYGGYKGITPAYFALIEFTDKKGSRQRLLEAVPLYLRADIDNDSNVLRDFYKNVLGLENPVVILNRIKKNSLLKINGFLIHLRGTTGFSASQLKVQNAVEFSLPHHMEDYVKKLENYEKHIIAERGSTKNSQIKITEWDGISKEKNLQLYDMFINKMENTIYKFRPANQVSNLKENREVFNLLAVEDQCSVLNQILMLFVCKPVTANLSLIKGSKNAGNMALSKIISNMRSAYLIHQSVTGLFEQKIDLLKVSSQKD

SEQ ID NO: 1112 - protein, 1370 aa, synthetic construct
  REGION 1..1370: note = MG72-19 effector
MSKKFAGEYYLGLDIGTDSVGWAVADNQYNVLKFNGKSMWGIRLFDAAQTAAERRMFRTARRRVERRRWRLELLQELFQNEIEKKDPDFFQRMKDSALYPEDSKTGKPFALFCDKDLNDKLYYKQYPTIYHLRKALLTENSKFDIRLVYLAIHHILKHRGHFLFNGDFSNVTRFSFAFEQLQTCLCNELDMDFECNNVQKLSEILKDTHMSKNDKVKASVALFENSGDKKQLQAVIGLFCGAKKKLADVFLDETLNDTEMPSISIADKPYEELRPELESILAEKCCVIDYIKAVYDWAILADMLDGGEYGNRTYISVARVRQYEKHHDDLKKLKKLVRLYCKSEYKSFFSVAGTDNYCAYIGDDIETDDRKSVKKCKQEDFYKRIKGLLKKAIENGCPKDEVVEIIKDIDAQVFLPLQVTKDNGVIPHQVHEMELKQILKNAEKYYPFLCKKDEEGIVTSNKILQLFKFRIPYYVGPLNSRIGKNSWIVRRAEGKIYPWNFEEKVDFDKSEEGFIRRMTNPCTYMAGADVLPKYSLLYSEFMVLNELNNVRICGDKLSVEIKQTIIKDLFQRTRRVTVRKLCDKLKAEGVISRNSNQKDIDIKGIDQDLKSSMVSYVDFKNIFGKEIEKYSVQQMCERIIFLLTIHHDDKRRLQKRIRAEFTETQITDDQLQKVLRLNYQGWGRFSAEFLKELKGVDTETGEVFSIINALRETDDNLMQLLSNRYTFAEELEKYNSNKRKKIEALTYDNIMEGIVASPAIKRSAWQAISIVMELSKIMGREPKRIFVEMARGPEEKKHTISRKNQLLELYKSVKDESRDWKTELETKTESDFRSIKLFLYYTQMGRCMYTGEPIDLDQLANTTIYDRDHIYPQSLTKDDSLNNLVLVKKVENANKGNGLISADIQKKMRGFWAELKKKGLISDEKFSRLTRTTPLSDDELAGFINRQLVETRQSSKIVADLFHQLYPTTQVVYVKAKIVSDFRHETLDMVKVRSLNDLHHAKDAYLNIVTGNVYYEKFSGNPLTWLRKNPDRNYSLNQMFNYDIVKKTKEGTSYVWKKGKDGSIAVVRRTMERNDILYTRQATENKNGGLFDQNIVSSKNKPFIPVKKGLDVNKYGGYKGITPAYFALIEFTDKKGSRQRLLEAVPLYLRADIDNDSNVLRDFYKNVLGLENPVVILNRIKKNSLLKINGFLIHLRGTTGFSASQLKVQNAVEFSLPHHMEDYVKKLENYEKHIIAERGSTKNSQIKITEWDGISKEKNLQLYDMFINKMENTIYKFRPANQVSNLKENREVFNSLAVEDQCSVLNQVLMLFVCKPVTANLSLIKGSKNAGNMALSKIISNMRSAYLIHQSVTGLFEQKIDLLKVSSQKD

SEQ ID NO: 1113 - protein, 1370 aa, synthetic construct
  REGION 1..1370: note = MG72-20 effector
MSKKFAGEYYLGLDIGTDSVGWAVTDNQYNVLKFNGKSMWGIRLFDAAQTAAERRMFRTARRRVERRRWRLELLQELFQNEIEKKDPDFFQRMKDSALYPEDSKTGKPFALFCDKDLNDKLYYKQYPTIYHLRKALLTENSKFDIRLVYLAIHHILKHRGHFLFNGDFSNVTRFSFAFEQLQTCLCNELDMDFECNNVQKLSEILKDTHMSKNDKVKASVALFENSGDKKQLQAVIGLFCGAKKKLADVFLDETLNDTEMPSISIADKPYEELRPELESILAEKCCVIDYIKAVYDWAILADMLDGGEYGNRTYISVARVRQYEKHHDDLKKLKKLVRLYCKSEYKSFFSVAGTDNYCAYIGDDIETDDRKSVKKCKQEDFYKRIKGLLKKAIENGCPKDEVVEIIKDIDAQVFLPLQVTKDNGVIPHQVHEMELKQILKNAEKYYPFLCKKDEEGIVTSNKILQLFKFRIPYYVGPLNSRIGKNSWIVRRAEGKIYPWNFEEKVDLDKSEEGFIRRMTNPCTYMAGADVLPKYSLLYSEFMVLNELNNVRICGDKLSVEIKQTIIKDLFQRTRRVTVRKLCDKLKAEGVISRNSNQKDIDIKGIDQDLKSSMVSYIDFKNIFGKEIEKYSVQQMCERIIFLLTIHHDDKRRLQKRIRAEFTETQITDDQLQKVLRLNYQGWGRFSAEFLKELKGVDTETGEVFSIINALRETDDNLMQLLSNRYTFSEELEKYNSNKRKKIEALTYDNIMEGVVASPAIKRSAWQAISIVMELSKIMGREPKRIFVEMARGPEEKKHTISRKNQLLELYKSVKDESRDWKTELETKTESDFRSIKLFLYYTQMGRCMYTGEPIDLDQLANTTIYDRDHIYPQSLTKDDSLNNLVLVKKVENANKGNGLISADIQKKMRGFWAELKKKGLISDEKFSRLTRTTPLSDDELAGFINRQLVETRQSSKIVADLFHQLYPTTQVVYVKAKIVSDFRHETLDMVKVRSLNDLHHAKDAYLNIVTGNVYYEKFSGNPLTWLRKNPDRNYSLNQMFNYDIVKKTKEGTSYVWKKGKDGSIAVVRRTMERNDILYTRQATENKNGGLFDQNIVSSKNKPFIPVKKGLDVNKYGGYKGITPAYFALIEFTDKKGSRQRLLEAVPLYLRADIDNDSNVLRDFYKNVLGLENPVVILNRIKKNSLLKVNGFLIHLRGTTGFSASQLKVQNAVEFSLPHHMEDYVKKLENYEKHIIAERGSKKISQIKITEWDGISKEKNLQLYDMFINKMENTIYKFRPANQVANLKENREVFNLLAVEDQCSVLNQILMLFVCKPVTANLSLIKGSKNAGNMALSKIISNMRSAYLIHQSVTGLFEQKIDLLKVSSQKD

SEQ ID NO: 1114 - protein, 1108 aa, synthetic construct
  REGION 1..1108: note = MG72-21 effector
EELRPELETILADKCCVIDHIKAVYDWGVLADMLTGGEWGTHTYLSVARVRQYEKHHDDLKSLKQLVRKYCPAEYKAFFSMPGSDNYCAYIGDDIETDERKSVKKCKQEDFYKRVKVLLKKAVDNKCPQNKTEKILRDIDAQDFLPLQVTKDNGVIPHQVHEMELLQILKNAEQYYPFLLKKDAEGNVVSDKILQLFRFRIPYYVGPLNNNAGKNSWIVRRAEGKIYPWDFEEKVDLDQSEEGFIRQMTNPCTYMVGAGVLPKNSLLYSEFALLNELNNVKVCGEKLPVELKQKIVGDLFRRVRRVTVRKLCDKLKAEGFVPKHANQSSIPIQPDDVTGIDQGFKSSMVSYIEMKMIFGKELEKYAVQQMCERIIFLLTIHQDDKNRLQKRIRAEYTDSQISDEQLQKILRLNYQGWGRLSAEFLTGLKGADTETGEIFTIIGALRQTEDNLMQLLSGRYTFSEELEKYNSSKRKKINALTYDNIMENVVASPAVKRSAWQAISIAMELRKIMGREPNRIFVEMARGPEEKKRTVSRKSRLLELYKHIKDESRDWKAELETREESAFRSIKLYLYYTQMGRCMYTGEPIELSQLADVNIYDRDHIYPQSLTKDDSLDNMVLVKKLENATKGNGLIPGRIQKKMSSFWKMLRDKGFISDEKYNRLTRTTPLTDEELAGFINRQLVETRQSSKIVAELFQQLYPSTQVIYVKAKTVSEFRNETLNMIKVRSLNDLHHAKDAYLNIVVGNVYHEKFTGNPLTWLKKNQDRKYSLNQMFNFDLTKKSKEGIVHVWKKGKDGSIGVVRKTMERNDILYTRQATENKNGGLFDQNIVSSKNKPSIPIKKGMDVNKYGGYKGITPACFALIEYTDKKGNRQRMIEAVPLYLLAEIEKDDKVLTGFCRNALGLNNPIVLLKGIKKNSLLKINGFPVHLRGTSGFTGTQLKVQNAAELCLTGHMEEYLKKLENYEKRKSEENQSKVGQLKVSKWDGITKEENLALYDAYISKLENTVYQYRPANQVANLKNNREIFKSLTIEDQCIALNQVQLLFVCKPVTADLTLINGSKIAGNMALSKNITNAKSAFLIHQSITGLFEQKIDLLTVKPKENQGVV

SEQ ID NO: 1115 - protein, 1370 aa, synthetic construct
  REGION 1..1370: note = MG72-22 effector
MSKKFAGEYYLGLDIGTDSVGWAVTDNQYNVLKFNGKSMWGIRLFDAAQTAAERRMFRTARRRVERRRWRLELLQELFQNEIEKKDPDFFQRMKDSALYPEDSKTGKPFALFCDKDLNDKLYYKQYPTIYHLRKALLTENSKFDIRLVYLAIHHILKHRGHFLFNGDFSNVTRFSFAFEQLQTCLCNELDMDFECNNVQKLSEILKDTHMSKNDKVKASVALFENSGDKKQLQAVIGLFCGAKKKLADVFLDETLNDTEMPSISIADKPYEELRPELESILAEKCCVIDYIKAVYDWAILADMLDGGEYGNRTYISVARVRQYEKHHDDLKKLKKLVRRYCKSEYKSFFSVAGTDNYCAYIGDDIETDDRKSVKKCKQEDFYKRIKGLLKKAIENGCPKDEVVEIIKDIDAQVFLPLQVTKDNGVIPHQVHEMELKQILKNAEKYYPFLCKKDEEGIVTSNKILQLFKFRIPYYVGPLNSRIGKNSWIVRRAEGKIYPWNFEEKVDFDKSEEGFIRRMTNPCTYMAGADVLPKYSLLYSEFMVLNELNNVRICGDKLSVEIKQTIIKDLFQRTRRVTVRKLCDKLKAEGVISRNSNQKDIDIKGIDQDLKSSMVSYVDFKNIFGKEIEKYSVQQMCERIIFLLTIHHDDKRRLQKRIRAEFTEAQITDDQLQKVLRLNYQGWGRFSAEFLKELKGVDTETGEVFSIINALRETDDNLMQLLSNRYTFAEELEKYNSNKRKKIEALTYDNIMEGIVASPAIKRSAWQAISIVMELSKIMGREPKRIFVEMARGPEEKKHTISRKNQLLELYKSVKDESRDWKTELETKTESDFRSIKLFLYYTQMGRCMYTGEPIDLDQLANTTIYDRDHIYPQSLTKDDSLNNLVLVKKVENANKGNGLISADIQKKMRGFWAELKKKGLISDEKFSRLTRTTPLSDDELAGFINRQLVETRQSSKIVADLFHQLYPTTQVVYVKAKIVSDFRHETLDMVKVRSLNDLHHAKDAYLNIVTGNVYYEKFSGNPLTWLRKNPDRNYSLNQMFNYDIVKKTKEGTSYVWKKGKDGSIAVVRRTMERNDILYTRQATENKNGGLFDQNIVSSKNKPFIPVKKGLDVNKYGGYKGITPAYFALIEFTDKKGSRQRLLEAVPLYLRADIDNDSNVLRDFYKNVLGLENPVVILNRIKKNSLLKINGFLIHLRGTTGFSASQLKVQNAVEFSLPHHMEDYVKKLENYEKHIIAERGSTKNSQIKITEWDGISKEKNLQLYDMFINKMENTIYKFRPANQVSNLKENREVFNSLAVEDQCSVLNQVLMLFVCKPVTANLSLIKGSKNAGNMALSKIISNMRSAYLIHQSVTGLFEQKIDLLKVSSQKD

SEQ ID NO: 1116 - protein, 1058 aa, synthetic construct; identical to SEQ ID NO: 301
  REGION 1..1058: note = MG73-11 effector

SEQ ID NO: 1117 - protein, 741 aa, synthetic construct
  REGION 1..741: note = MG73-12 effector
FNLPNDIKFNISYTAPAKKKSKKKEETQSPEQAAQAPQEYDAEKNTTLYNMTGFHALKKALKSSPLWAEYQTNPNGILDKIAEVLSRYKSDGEIRQYLTALGLPAEAVEKLQNVNFSGFMNLSLVAMNKIIPFLKEGFRYDVACKKAGYNFQAPQQNKGLSKLPPLTENDNHTITSPVAKRSLAQARKVINALNKKYGPFDAVHIEVAREIGKSFEQRKEIEAKQKANAEERTQLKEVGIDGIIPQTETDLKKLRLWKEQDGRCMYSLQYIEPQKILEEGYCQVDHIIPYSLSFDNSLNNQVLCLTSENQHKKNQIPYEYFHSGKAQITWEDFEGYVNSLQNMRMAKKHRLLKQELTEDDLQGFKERNLSDTKLISRFMKNYLLANLRLTGKYKQGIFCVNGKHTSTLRGFWRLQKIREDGDKHHALDAIVIACCTNRLMQYISTKYRQNRELELQRKEVAVPWPFPHFKHAVENSLLSIFVSRPPRKKVTGALHKNTFFSAKHIKKGIKTLRTDIQKLTLDSLKKQRELEVKHFGVERNKPLYDLIETALNNRPNDKTPIQVQMPTRNGGFVPVRHIKLISESTSGIPVLGGTALAENDSMPRVDVFLENGQYYVVPVYTMDFAKGVLPLVAQPSGRLMKKENFVFSLYKDDYVNLVNKQGETWEGYFKQLNAQTGQIYLESHDRSAQYTVSGKPSNQKKIASSTLKLIEKYQIDIFGGKHLVKKEKYIGIIRKNKGFGG

SEQ ID NO: 1118 - protein, 1027 aa, synthetic construct; identical to SEQ ID NO: 296
  REGION 1..1027: note = MG73-13 effector

SEQ ID NO: 1119 - protein, 1098 aa, synthetic construct
  REGION 1..1098: note = MG74-51 effector
MQVRDDVILGLDIGVGSLGWALLEEDLQTGEQRLLQRQTPQGETTYALGVRLFHVPENAKTKELLNVKRRTARMQRRTTARRAQRMRRVRALLDSLGVPGVRDADAFHLGKGRGAQCDPWQLRREGLERRLEAREWAVVLLHIAKHRGFRSNSKTDRSGSDKEMGQVLQAVSNLQQEVEASGLTVGALLASRERRRNRADHTGAPRYDLCMLRSLQENEVDILFTRQRELGNPLAGEEVRCRYAELAFAQRPLAPVSHMVGPCAFLEGERRAPRFAPTAELFRYVQALCNMRLRQETGEETPLSEEQRQAACAVFGSVQSVTYKKLRQVLRLPAGCRFAGLSYGVTEKGNVQDPEKADVVMRTGKCCQGTACLRGILGDAYEALHEQRLDEADAARLAATGALSAPAAALLARGMAGLRLTDAVARIVSELNDLDQIRAVLALLPLAAPRIAALSQAAGEGKLGIFQGSARLSLRAMEAILPHMLACGEYAAACELAGFDPRAAQKTDVTDIRNPVVLRVFREVRRQFSAICREFGFLPGRVHVELLREVGKSGEERNRISRGLERRTKEKEAARKAVAQLLGKSPETVSAGEVQRYELWRQQDGKCAYYMLWRHAGGERAYGDAMPQGSIPPAWLADGVNAVQVDHILPRSRTFDNSFHNLCLCCHAANQAKGGRTPWEWLGAAQPQAWHDFEQWVQSLPLKGLKKRNYLLRDLNAEVQGRFHARNLTDSGYVARLTLRWLEEEYARHDVPMQDADGRTRRRFFARPGQVTDFLRRHWGVQALKKIDGQRSGDRHHALDALLVAACSEGMLQRMVRAFQRKENGPERLHIPCPWQDFSATVGRALGSVFVSRVERGRTKGPLHEETLRAIREERQPDGETRRVLYERKAVARLTAADLDKIKDAARCPDVVAALRRWLDAGKPGDALPRSAHGDIIRHVRVCAGEFSSGVVLQRGSGQAQASNGGMVRTDIYSRDGKFYMVPVYAKDVADKRLPLRACVAAKAEKDWREMTADYRFLFSLTPDCYVLTENRKGEVKEGYFAGANRNTSAISLSLAHDKQNVIQGIGITTLKRFEKYRVDRFGRLSLVRREADPRGRS

SEQ ID NO: 1120 - protein, 1098 aa, synthetic construct
  REGION 1..1098: note = MG74-52 effector
MQVHDDVILGLDIGVGSLGWALLEEDLQTGEQRLLQRQTPQGETTYALGVRLFHVPENAKTKELLNVKRRTARMQRRTTARRAQRMRRVRALLDSLGVPGVRDADAFHLGKGRGAQCDPWQLRREGLERRLEAREWAVVLLHIAKHRGFRSNSKTDRSGSDKEMGQVLQAVSNLQQEVEASGLTVGALLASRERRRNRADHTGAPRYDLCMLRSLQENEVDILFTRQRELGNPLAGEEVRCRYAELAFAQRPLAPVSHMVGPCAFLEGERRAPRFAPTAELFRYVQALCNMRLRQETGEETPLSEEQRQAACAVFGSVQSVTYKKLRQVLRLPAGCRFAGLSYGVTEKGNVQDPEKADVVMRTGKCCQGTACLRGILGDAYEALHEQRLDEADAARLAATGALSAPAAALLARGMAGLRLTDAVARIVSELNDLDQIRAVLALLPLAAPRIAALSQAAGEGKLGIFQGTARLSLRAMEAILPHMLACGEYAAACELAGFDPRAAQKTDVTDIRNPVVLRVFREVRRQFSAICREFGFLPGRVHVELLREVGKSGEERNRISRGLERRTKEKEAARKAVAQLLGKSPETVSAGEVQRYELWRQQDGKCAYYMLWRHAGGERAYGDAMPQGSIPPDWLADGVNAVQVDHILPRSRTFDNSFHNLCLCCHAANQAKGGRTPWEWLGAAQPQAWHDFEQWVQSLPLKGLKKRNYLLRDLNAEVQGRFHARNLTDSGYVARLTLRWLEEEYARHDVPMQDADGRTRRRFFARPGQVTDFLRRHWGVQALKKIDGQRSGDRHHALDALLVAACSEGMLQRMVRAFQREENGPERLHIPCPWQDFSATVGRALGSVFVSRVERGRTKGPLHEETLRAIREERQPDGETRRVLYERKAVARLTVADLDRIKDAARCPDVVAALRRWLDAGKPGDDLPRSAHGDIIRHVRVRAGEFSSGVILQRGSGQAQAKNGGIVRTDIYSRDGKFYMVPVYAKDVADKRLPLRACVAHKDEKDWLELTEDYHFLFSLTPDCYVLTENRKGEVKEGYFEGPDRGSANISLSLAHDKKNTIRGIGIQNLKRFEKYRVDRFGRLSLVRREADPRGRP

SEQ ID NO: 1121 - protein, 551 aa, synthetic construct
  REGION 1..551: note = MG74-53 effector
REVGKSGEERNRISRGLERRTKEKEAARKAVAQLLGKSPETVSAGEVQRYELWRQQDGKCAYYMLWRHAGGERAYGDAMPQGSIPPDWLADGVNAVQVDHILPRSRTFDNSFHNLCLCCHAANQAKGGRTPWEWLGAAQPQAWHDFEQWVQSLPLKGLKKRNYLLRDLNAEVQGRFHARNLTDSGYVARLTLRWLEEEYARHDVPMQDADGRTRRRFFARPGQVTDFLRRHWGVQALKKIDGQRSGDRHHALDALLVAACSEGMLQRMVRAFQREENGPERLHIPCPWQDFSATVGRALGSVFVSRVERGRTKGPLHEETLRAIREERQPDGETRRVLYERKAVAKLTAADLDKIKDAARCPDVVAALRRWLDAGKPGDALPRSAHGDIIRHVRVCAGEFSSGVVLQRGSGQAQASNGGMVRTDIYSRDGKFYMVPVYAKDVADKRLPLRACVAAKAEKDWREMTADYRFLFSLTPDCYVLTENRKGEVKEGYFAGANRNTSAISLSLAHDKQNVIQGIGITTLKRFEKYRVDRFGRLSLVRREADPRGRS

SEQ ID NO: 1122 - protein, 1098 aa, synthetic construct
  REGION 1..1098: note = MG74-54 effector
MQVRDDVILGLDIGVGSLGWALLEEDLQTGEQRLLQRQTPQGETTYALGVRLFHVPENAKTKELLNVKRRTARMQRRTTARRAQRMRRVRALLDSLGVPGVRDADAFHLGKGRGAQCDPWQLRREGLERRLEAREWAVVLLHIAKHRGFRSNSKTDRSGSDKEMGQVLQAVSNLQQEVEASGLTVGALLASRERRRNRADHTGAPRYDLCMLRSLQENEVDILFTRQRELGNPLAGEEVRCRYAELAFAQRPLAPVSHMVGPCAFLEGERRAPRFAPTAELFRYVQALCNMRLRQETGEETPLSEEQRQAACAVFGSVQSVTYKKLRQVLRLPAGCRFAGLSYGVTEKGNVQDPEKADVVMRTGKCCQGTACLRGILGDAYEALHEQRLDEADAARLAATGALSAPAAALLAQGMAGLRLTDAVARIVSELNDLDQIRAVLALLPLAAPRIAALSQAAGEGKLGIFQGSARLSLRAMEAILPHMLACGEYAAACELAGFDPRAAQKTDVTDIRNPVVLRVFREVRRQFSAICREFGFLPGRVHVELLREVGKSGEERNRISRGLERRTKEKEAARKAVAQLLGKSPETVSAGEVQRYELWRQQDGKCAYYMLWRHAGGERAYGDAMPQGSIPPAWLADGVNAVQVDHILPRSRTFDNSFHNLCLCCHAANQAKGGRTPWEWLGAAQPQAWHDFEQWVQSLPLKGLKKRNYLLRDLNAEVQGRFHARNLTDSGYVARLTLRWLEEEYARHDVPMQDADGRTRRRFFARPGQVTDFLRRHWGVQALKKIDGQRSGDRHHALDALLVAACSEGMLQRMVRAFQREENGPERLHIPCPWQDFSATVGRALGSVFVSRVERGRTKGPLHEETLRAIREERQPDGETRRVLYERKAVARLTAADLDKIKDAARCPDVVAALRRWLDAGKPGDALPRSAHGDIIRHVRVCAGEFSSGVVLQRGSGQAQASNGGMVRTDIYSRDGKFYMVPVYAKDVADKRLPLRACVAAKAEKDWREMTADYRFLFSLTPDCYVLTENRKGEVKEGYFAGANRNTSAISLSLAHDKQHVIQGIGITTLKRFEKYRVDRFGRLSLVRREADPRGRS

SEQ ID NO: 1123 - protein, 1098 aa, synthetic construct
  REGION 1..1098: note = MG74-55 effector
MQVRDDVILGLDIGVGSLGWALLEEDLQTGEQRLLQRQTSQGETTYALGVRLFHVPENAKTKELLNVKRRTARMQRRTTARRAQRMRRVRALLDSLGVPGVRDADAFHLGKGRGAQCDPWQLRREGLERRLEAREWAVVLLHIAKHRGFRSNSKTDRSGSDKEMGQVLQAVSNLQQEVEASGLTVGALLASRERRRNRADHTGAPRYDLCMLRSLQENEVDILFTRQRELGNPLAGEEVRCRYAELAFAQRPLAPVSHMVGPCAFLEGERRAPRFAPTAELFRYVQALCNMRLRQETGEETPLSEEQRQAACAVFGSVQSVTYKKLRQVLRLPAGCRFAGLSYGVTEKGNVQDPEKADVVMRTGKCCQGTACLRGILGDAYEALHEQRLDEADAARLAATGALSAPAAALLARGMAGLRLTDAVARIVSELNDLDQIRAVLALLPLAAPRIAALSQAAGEGKLGIFQGSARLSLRAMEAILPHMLACGEYAAACELAGFDPRAAQKTDVTDIRNPVVLRVFREVRRQFSAICREFGFLPGRVHVELLREVGKSGEERNRISRGLERRTKEKEAARKAVAQLLGKSPETVSAGEVQRYELWRQQDGKCAYYMLWRHAGGERAYGDAMPQGSIPPAWLADGVNAVQVDHILPRSRTFDNSFHNLCLCCHAANQAKGGRTPWEWLGAAQPQAWHDFEQWVQSLPLKGLKKRNYLLRDLNAEVQGRFHARNLTDSGYVARLTLRWLEEEYARHDVPMQDADGRTRRRFFARPGQVTDFLRRHWGVQALKKIDGQRSGDRHHALDALLVAACSEGMLQRMVRAFQREENGPERLHIPCPWQDFSATVGRALGSVFVSRVERGRTKGPLHEETLRAIREERQPDGETRRVLYERKAVARLTAADLDKIKDAARCPDVVAALRRWLDAGKPGDALPRSAHGDIIRHVRVCAGEFSSGVVLQRGSGQAQASNGGMVRTDIYSRDGKFYMVPVYAKDVADKRLPLRACVAAKAEKDWREMTADYRFLFSLTPDCYVLTENRKGEVKEGYFAGANRNTSAISLSLAHDKQNVIQGIGITTLKRFEKYRVDRFGRLSLVRREADPRGRS

SEQ ID NO: 1124 - protein, 1098 aa, synthetic construct
  REGION 1..1098: note = MG74-56 effector
MQVHDDVILGLDIGVGSLGWALLEEDLQTGEQRLLQRQTPQGETTYALGVRLFHVPENAKTKELLNVKRRTARMQRRTTARRAQRMRRVRALLDSLGVPGVRDADAFHLGKGRGAQCDPWQLRREGLERRLEAREWAVVLLHIAKHRGFRSNSKTDRSGSDKEMGQVLQAVSNLQQEVEASGLTVGALLASRERRRNRADHTGAPRYDLCMLRSLQENEVDILFTRQRELGNPLAGEEVRCRYAELAFAQRPLAPVSHMVGPCAFLEGERRAPRFAPTAELFRYVQALCNMRLRQETGEETPLSEEQRQAACAVFGSVQSVTYKKLRQVLRLPAGCRFAGLSYGVTEKGNVQDPEKADVVMRTGKCCQGTACLRGILGDAYEALHEQRLDEADAARLAATGALSAPAAALLARGMAGLRLTDAVARIVSELNDLDQIRAVLALLPLAAPRIAALSQAAGEGKLGIFQGSARLSLRAMEAILPHMLACGEYAAACELAGFDPRAAQKTDVTDIRNPVVLRVFREVRRQFSAICREFGFLPGRVHVELLREVGKSGEERNRISRGLERRTKKKEAARKAVAQLLGKSPETVSAGEVQRYELWRQQDGKCAYYMLWRHAGGERAYGDAMPQGSIPPAWLADGVNAVQVDHILPRSRTFDNSFHNLCLCCHAANQAKGGRTPWEWLGAAQPQAWHDFEQWVQSLPLKGLKKRNYLLRDLNAEVQGRFHARNLTDSGYVARLTLRWLEEEYARHDVPMQDADGRTRRRFFARPGQVTDFLRRHWGVQALKKIDGQRSGDRHHALDALLVAACSEGMLQRMVRAFQREENGPERLHIPCPWQDFSATVGRALGSVFVSRVERGRTKGPLHEETLRAIREERQPDGETRRVLYERKAVARLTAADLDKIKDAARCPDVVAALRRWLDAGKPGDALPRSAHGDIIRHVRVCAGEFSSGVVLQRGSGQAQASNGGMVRTDIYSRDGKFYMVPVYAKDVADKRLPLRACVAAKAEKDWREMTADYRFLFSLTPDCYVLTENRKGEVKEGYFAGANRNTSAISLSLAHDKQNVIQGIGITTLKRFEKYRVDRFGRLSLVRREADPRGRS

SEQ ID NO: 1125 - protein, 1098 aa, synthetic construct
  REGION 1..1098: note = MG74-57 effector
MQVRDDVILGLDIGVGSLGWALLEEDLQTGEQRLLQRQTPQGETTYALGVRLFHVPENAKTKELLNIKRRTARMQRRTTARRAQRMRRVRALLDSRGVPGVRDADAFHLGKGRGAQCDPWQLRREGLERRLEAREWAVVLLHIAKHRGFRSNSKTDRSGSDKEMGQVLQAVSNLQQEVEASGLTVGALLASRERRRNRADHTGAPRYDLCMLRSLQENEVDILFTRQRELDNPLAGEEVRCRYAELAFAQRPLAPVSHMVGPCAFLEGERRAPRFAPTAELFRYVQALCNMRLRQETGEETPLSEEQRQAACAVFGSVQSVTYKKLRQVLRLPAGCRFAGLSYGVTEKGNVQDPEKADVVMRTGKCCQGTACLRGILGDAYEALHEQRLDEADAARLAATGALSAPAAALLARGMAGLRLTDAVARIVSELNDLNQIRAVLALLPLAAPRIAALSQAAGEGKLGIFQGTARLSLRAMEAILPHMLACGEYAAACELAGFDPRAAQKTDVTDIRNPVVLRVFREVRRQFSAICREFGFLPGRVHVELLREVGKSGEERNRISRGLERRTKEKEAARKAVAQLLGKSPETVSAGEVQRYELWRQQDGKCAYYMLWRHAGGERAYGDAMPQGSIPPDWLADGVNAVQVDHILPRSRTFDNSFHNLCLCCHAANQAKGGRTPWEWLGAAQPQAWHDFEQWVQSLPLKGLKKRNYLLRDLNAEVQGRFHARNLTDSGYVARLTLRWLEEEYARHDVPMQDADGRTRRRFFARPGQVTDFLRRHWGVQALKKIDGQRSGDRHHALDALLVAACSEGMLQRMVRAFQREENGPERLHIPCPWQDFSATVGRALGSVFVSRVERGRTKGPLHEETLRAIREERQPDGETRRVLYERKAVAKLTAADLDKIKDAARCPDVVAALRRWLDAGKPGDALPRSAHGDIIRHVRVCAGEFSSGVVLQRGSGQAQASNGGMVRTDIYSRDGKFYMVPVYAKDVADKRLPLRACVAAKAEKDWREMTADYRFLFSLTPDCYVLTENRKGEVKEGYFAGANRNTSAISLSLAHDKQNVIQGIGITTLKRFEKYRVDRFGRLSLVRREADPRGRS

SEQ ID NO: 1126 - protein, 1098 aa, synthetic construct
  REGION 1..1098: note = MG74-58 effector
MQVRDDVILGLDIGVGSLGWALLEEDLQTGEQRLLQRQTPQGETTYALGVRLFHVPENAKTKELLNVKRRTARMQRRTTARRAQRMRRVRALLDSLGVPGVRDADAFHLGKGRGAQCDPWQLRREGLERRLEAREWAVVLLHIAKHRGFRSNSKTDRSGSDKEMGQVLQAVSNLQQEVEASGLTVGALLASRERRRNRADHTGAPRYDLCMLRSLQENEVDILFTRQRELGNPLAGEEVRCRYAELAFAQRPLAPVSHMVGPCAFLEGERRAPRFAPTAELFRYVQALCNMRLRQETGEETPLSEEQRQAACAVFGSVQSVTYKKLRQVLRLPAGCRFAGLSYGVTEKGNVQDPEKADVVMRTGKCCQGTACLRGILSDAYEALHEQRLDEADAARLAATGALSAPAAALLARGMAGLRLTDAVARIVSELNDLDQIRAVLALLPLAAPRIAALSQAAGEGKLGIFQGSARLSLRAMEAILPHMLACGEYAAACELAGFDPRAAQKTDVTDIRNPVVLRVFREVRRQFSAICREFGFLPGRVHVELLREVGKSGEERNRISRGLERRTKEKEAARKAVAQLLGKSPETVSAGEVQRYELWRQQDGKCAYYMLWRHAGGERAYGDAMPQGSIPPDWLADGVNAVQVDHILPRSRTFDNSFHNLCLCCHAANQAKGGRTPWEWLGAAQPQAWHDFEQWVQSLPLKGLKKRNYLLRDLNAEVQGRFHARNLTDSGYVARLTLRWLEEEYARHDVPMQDADGRTRRRFFARPGQVTDFLRRHWGVQALKKIDGQRSGDRHHALDALLVAACSEGMLQRMVRAFQREENGPERLHIPCPWQDFSATVGRALGSVFVSRVERGRTKGPLHEETLRAIREERQPDGETRRVLYERKAVAKLTAADLDKIKDAARCPDVVAALRRWLDAGKPGDALPRSAHGDIIRHVRVCAGEFSSGVVLQRGSGQAQASNGGMVRTDIYSRDGKFYMVPVYAKDVADKRLPLRACVAAKAEKDWREMTADYRFLFSLTPDCYVLTENRKGEVKEGYFAGANRNTSAISLSLAHDKQNVIQGIGITTLKRFEKYRVDRFGRLSLVRREADPRGRS

SEQ ID NO: 1127 - protein, 1098 aa, synthetic construct
  REGION 1..1098: note = MG74-59 effector
MRVRDDVILGLDIGVGSLGWALLEEDLQTGEQRLLQRQTPQGETTYALGVRLFNVPENAKTKELLNVKRRTARMQRRTTARRAQRMRRVRALLDSLGVPGVRDADAFHLGKGRGAQCDPWQLRREGLERRLEAREWAVVLLHIAKHRGFRSNSKTDRSGSDKEMGQVLQAVSNLQQEVEASGLTVGALLASRERRRNRADHTGAPRYDLCMLRSLQENEVDILFTRQRELGNPLAGEEVRCRYAELAFAQRPLAPVSHMVGPCAFLEGERRAPRFAPTAELFRYVQALCNMRLRQETGEETPLSEEQRQAACAVFGSVQSVTYKKLRQVLRLPAGCRFAGLSYGVTEKGNVQDPEKADVVMRTGKCCQGTACLRGILGDAYEALHEQRLDEADAARLAATGALSAPAAALLARGMAGLRLTDAVARIVSELNDLDQIRAVLALLPLAAPRIAALSQAAGEGKLGIFQGSARLSLRAMEAILPHMLACGEYAAACELAGFDPRAAQKTDVTDIRNPVVLRVFREVRRQFSAICREFGFLPGRVHVELLREVGKSGEERNRISRGLERRTKEKEAARKAVAQLLGKSPETVSAGEVQRYELWRQQDGKCAYYMLWRHAGGERAYGDAMPQGSIPPDWLADGVNAVQVDHILPRSRTFDNSFHNLCLCCHAANQAKGGRTPWEWLGAAQPQAWHDFEQWVQSLPLKGLKKRNYLLRDLNAEVQGRFHARNLTDSGYVARLTLRWLEEEYARHDVPMQDADGRTRRRFFARPGQVTDFLRRHWGVQALKKIDGQRSGDRHHALDALLVAACSEGMLQRMVRAFQREENGPERLHIPCPWQDFSATVGRALGSVFVSRVERGRTKGPLHEETLRAIREERQPDGETRRVLYERKAVARLTAADLDKIKDAARCPDVVAALRRWLDAGKPGDALPRSAHGDIIRHVRVCAGEFSSGVVLQRGSGQAQASNGGMVRTDIYSRDGKFYMVPVYAKDVADKRLPLRACVAAKAEKDWREMTADYRFLFSLTPDCYVLTENRKGEVKEGYFAGANRNTSAISLSLAHDKQNVIQGIGITTLKRFEKYRVDRFGRLSLVRREADPRGRS

SEQ ID NO: 1128 - protein, 1098 aa, synthetic construct
  REGION 1..1098: note = MG74-60 effector
MQVHDDVILGLDIGVGSLGWALLEEDLQTGEQRLLQRQTPQGETTYALGVRLFHVPENAKTKELLNVKRRTARMQRRTTARRAQRMRRVRALLDSLGVPGVRDADAFHLGKGRGAQCDPWQLRREGLERRLEAREWAVVLLHIAKHRGFRSNSKTDRSGSDKEMGQVLQAVSNLQQEVEASGLTVGALLASRERRRNRADHTGAPRYDLCMLRSLQENEVDILFTRQRELGNPLAGEEVRCRYAELAFAQRPLAPVSHMVGPCAFLEGERRAPRFAPTAELFRYVQALCNMRLRQETGEETPLSEEQRQAACAVFGSVQSVTYKKLRQVLRLPAGCRFAGLSYGVTEKGNVQDPEKADVVMRTGKCCQGTACLRGILGDAYEALHEQRLDEADAARLAATGALSAPAAALLARGMAGLRLTDAVARIVSELNDLDQIRAVLALLPLAAPRIAALSQAAGEGKLGIFQGSARLSLRAMEAILPHMLACGEYAAACELAGFDPRAAQKTDVTDIRNPVVLRVFREVRRQFSAICREFGFLPGRVHVELLREVGKSGEERNRISRGLERRTKEKEAARKAVAQLLGKSPETVSAGEVQRYELWRQQDGKCAYYMLWRHAGGERAYGDAMPQGSIPPAWLADGVNAVQVDHILPRSRTFDNSFHNLCLCCHAANQAKGGRTPWEWLGAAQPQAWHDFEQWVQSLPLKGLKKRNYLLRDLNAEVQGRFHARNLTDSSYVARLTLRWLEEEYARHDVPMQDAEGRTRRRFFARPGQVTDFLRRHWGVQALKKIDGQRSGDRHHALDALLVAACSEGMLQRMVRAFQREENGPERLHIPCPWQDFSATVGRALGSVFVSRVERGRTKGPLHEETLRAIREERQPDGETRRVLYERKAVARLTAADLDKIKDAARCPDVVAALRRWLDAGKPGDALPRSAHGDIIRHVRVCAGEFSSGVVLQRGSGQAQASNGGMVRTDIYSRDGKFYMVPVYAKDVADRRLPLRACVAAKAEKDWREMTADYRFLFSLTPDCYVLTENRKGEVKEGYFIGSDRSTAAISLSLAHDRQQSLRGIGITTLKRFEKYRVDRFGRLSSVRREADPRGRS

SEQ ID NO: 1129 - protein, 1098 aa, synthetic construct
  REGION 1..1098: note = MG74-61 effector
MQVRDDVILGLDIGVGSLGWALLEEDLQTGEQRLLQRQTPQGETTYALGVRLFHVPENAKTKELLNVKRRTARMQRRTTARRAQRMLRVRALLDSLGVPGVRDADAFHLGKGRGAQCDPWQLRREGLERRLEAREWAVVLLHIAKHRGFRSNSKTDRSGSDKEMGQVLQAVSNLQQEVEASGLTVGALLASRERRRNRADHTGAPRYDLCMLRSLQENEVDILFTRQRELGNPLAGEEVRCRYAELAFAQRPLAPVSHMVGPCAFLEGERRAPRFAPTAELFRYAQALCNMRLRQEPGEETPLSEEQRQAACAVFGSVQSVTYKKLRQVLRLPAGCRFAGLSYGVTEKGNVQDPEKADVVMRTGKCCQGTACLRGILGDAYEALHEQRLDEADAARLAATGALSAPAAALLARGMAGLRLTDAVARIVSELNDLDQIRAVLALLPLAAPRIAALSQAAGEGKLGIFQGSARLSLRAMEAILPHMLACGEYAAACELAGFDPRAAQKTDVTDIRNPVVLRVFREVRRQFSAICREFGFLPGRVHVELLREVGKSGEERNRISRGLERRTKEKEAARKAVAQLLGKSPETVSAGEVQRYELWRQQDGKCAYYMLWRHAGGERAYGDAMPQGSIPPAWLADGVNAVQVDHILPRSRTFDNSFHNLCLCCHAANQAKGGRTPWEWLGAAQPQAWHDFEQWVQSLPLKGLKKRNYLLRDLNAEVQGRFHARNLTDSGYVARLTLRWLEEEYARHDVPMQDADGRTRRRFFARPGQVTDFLRRHWGVQALKKIDGQRSGDRHHALDALLVAACSEGMLQRMVRAFQREENGPERLHIPCPWQDFSATVGRALGSVFVSRVERGRTKGPLHEETLRAIREERQPDGETRRVLYERKAVARLTAADLDKIKDAARCPDVVAALRRWLDAGKPGDALPRSAHGDIIRHVRVCAGEFSSGVVLQRGSGQAQASNGGMVRTDIYSRDGKFYMVPVYAKDVADKRLPLRACVAAKAEKDWREMTADYRFLFSLTPDCYVLTENRKGEVKEGYFAGANRNTSAISLSLAHDKQNVIQGIGITTLKRFEKYRVDRFGRLSLVRREADPRGRS

SEQ ID NO: 1130 - protein, 1098 aa, synthetic construct
  REGION 1..1098: note = MG74-62 effector
MQVRDDVILGLDIGVGSLGWALLEEDLQTGEQRLLQRQTPQGETTYALGVRLFNVPENAKTKELLNIKRRTARMQRRTTARRAQRMRRVRALLDSLGVPGVRDADAFHLGKGRGAQCDPWQLRREGLERRLEAREWAVVLLHIAKHRGFRSNSKTDRSGSDKEMGQVLQAVSNLQQEVEASGLTVGALLASRERRRNRADHTGAPRYDLCMLRSLQENEVDILFTRQRELGNPLAGEEVRCRYAELAFAQRPLAPVSHMVGPCAFLEGERRAPRFAPTAELFRYVQALCNMRLRQETGEETPLSEEQRQAACAVFGSVQSVTYKKLRQVLRLPAGCRFAGLSYGVTEKGNVQDPEKADVVMRTGKCCQGTACLRGILGDAYEALHEQRLDEADAARLAATGALSAPAAALLARGMAGLRLTDAVARIVSELNDLDQIRAVLALLPLAAPRIAALSQAAGEGKLGIFQGSARLSLRAMEAILPHMLACGEYAAACELAGFDPRAAQKTDVTDIRNPVVLRVFREVRRQFSAICREFGFLPGRVHVELLREVGKSGEERNRISRGLERRTKEKEAARKAVAQLLGKSPETVSAGEVQRYELWRQQDGKCAYYMLWRHAGGERAYGDAMPQGSIPPDWLADGVNAVQVDHILPRSRTFDNSFHNLCLCCHAANQAKGGRTPWEWLGAAQPQAWHDFEQWVQSLPLKGLKKRNYLLRDLNAEVQGRFHARNLTDSGYVARLTLRWLEEEYARHDVPMQDADGRTRRRFFARPGQVTDFLRRHWGVQALKKIDGQRSGDRHHALDALLVAACSEGMLQRMVRAFQREENGPERLHIPCPWQDFSATVGRALGSVFVSRVERGRTKGPLHEETLRAIREERQPDGETRRVLYERKAVARLTAADLDKIKDAARCPDVVAALRRWLDAGKPGDALPRSAHGDIIRHVRVCAGEFSSGVVLQRGSGQAQASNGGMVRTDIYSRDGKFYMVPVYAKDVADKRLPLRACVAAKAEKDWREMTADYRFLFSLTPDCYVLTENRKGEVKEGYFAGANRNTSAISLSLAHDKQNVIQGIGITTLKRFEKYRVDRFGRLSLVRREADPRGRS

SEQ ID NO: 1131 - protein, 1098 aa, synthetic construct
  REGION 1..1098: note = MG74-63 effector
MQVHDDVILGLDIGVGSLGWALLEEDLQTGEQRLLQRQTPQGETTYALGVRLFHVPENAKTKELLNVKRRTARMQRRTTARRAQRMRRVRALLDSLGVPGVRDADAFHLGKGRGAQCDPWQLRREGLERRLEAREWAVVLLHIAKHRGFRSNSKTDRSGSDKEMGQVLQAVSNLQQEVEASGLTVGALLASRERRRNRADHTGAPRYDLCMLRSLQENEVDILFTRQRELGNPLAGEEVRCRYAELAFAQRPLAPVSHMVGPCAFLEGERRAPRFAPTAELFRYVQALCNMRLRQETGEETPLSEEQRQAACAVFGSVQSVTYKKLRQVLRLPAGCRFAGLSYGVTEKGNVQDPEKADVVMRTGKCCQGTACLRGILGDAYEALHEQRLDEADAARLAATGALSAPAAALLARGMAGLRLTDAVARIVSELNDLDQIRAVLALLPLAAPRIAALSQAAGEGKLGIFQGSARLSLRAMEAILPHMLACGEYAAACELAGFDPRAAQKTDVTDIRNPVVLRVFREVRRQFSAICREFGFLPGRVHVELLREVGKSGEERNRISRGLERRTKEKEAARKAVAQLLGKSPETVSAGEVQRYELWRQQDGKCAYYMLWRHAGGERAYGDAMPQGSIPPAWLADGVNAVQVDHILPRSRTFDNSFHNLCLCCHAANQAKGGRTPWEWLGAAQPQAWHDFEQWVQSLPLKGLKKRNYLLRDLNAEVQGRFHARNLTDSGYVARLTLRWLEEEYARHDVPMQDADGRTRRRFFARPGQVTDFLRRHWGVQALKKIDGQRSGDRHHALDALLVAACSEGMLQRMVRAFQREENGPERLHLPCPWQDFSATVGRALGSVFVSRVERGRTKGPLHEETLRAIREERQPDGETRRVLYERKAVARLTAADLDKIKDAARCPDVVAALRRWLDAGKPGDALPRSAHGDIIRHVRVCAGEFSSGVVLQRGSGQAQASNGGMVRTDIYSRDGKFYMVPVYAKDVADRRLPLRACVAAKAEKDWREMTADYRFLFSLTPDCYVLTENRKGEVKEGYFIGSDRSTAAISLSLAHDRQQSLRGIGITTLKRFEKYRVDRFGRLSSVRREADPRGRS

SEQ ID NO: 1132 - protein, 1098 aa, synthetic construct
  REGION 1..1098: note = MG74-64 effector
MQVHDDVILGLDIGVGSLGWALLEEDLQTGEQRLLQRQTPQGETTYALGVRLFHVPENAKTKELLNVKRRTARMQRRTTARRAQRMRRVRALLDSLGVPGVRDADAFHLGKGRGAQCDPWQLRREGLERRLEAREWAVVLLHIAKHRGFRSNSKTDRSGSDKEMGQVLQAVSNLQQEVEASGLTVGALLASRERRRNRADHTGAPRYDLCMLRSLQENEVDILFTRQRELGNPLAGEEVRCRYAELAFAQRPLAPVSHMVGPCAFLEGERRAPRFAPTAELFRYVQALCNMRLRQETGEETPLSEEQRQAACAVFGSVQSVTYKKLRQVLRLPAGCRFAGLSYGVTEKGNVQDPEKADVVMRTGKCCQGTACLRGILGDAYEALHEQRLDEADAARLAATGALSAPAAALLARGMAGLRLTDAVARIVSELNDLDQIRAVLALLPLAAPRIAALSQAAGEGKLGIFQGSARLSLRAMEAILPHMLACGEYAAACELAGFDPRAAQKADVTDIRNPVVLRVFREVRRQFSAICREFGFLPGRVHVELLREVGKSGEERNRISRGLERRTKEKEAARKAVAQLLGKSPETVSAGEVQRYELWRQQDGKCAYYMLWRHAGGERAYGDAMPQGSIPPAWLADGVNAVQVDHILPRSRTFDNSFHNLCLCCHAANQAKGGRTPWEWLGAAQPQAWHDFEQWVQSLPLKGLKKRNYLLRDLNAEVQGRFHARNLTDSGYVARLTLRWLEEEYARHDVPMQDADGRTRRRFFARPGQVTDFLRRHWGVQALKKIDGQRSGDRHHALDALLVAACSEGMLQRMVRAFQREENGPERLHIPCPWQDFSATVGRALGSVFVSRVERGRTKGPLHEETLRAIREERQPDGETRRVLYERKAVARLTAADLDKIKDAARCPDVVAALRRWLDAGKPGDALPRSAHGDIIRHVRVCAGEFSSGVVLQRGSGQAQASNGGMVRTDIYSRDGKFYMVPVYAKDVADRRLPLRACVAAKAEKDWREMTADYRFLFSLTPDCYVLTENRKGEVKEGYFIGSDRSTAAISLSLAHDRQQSLRGIGITTLKRFEKYRVDRFGRLSSVRREADPRGRS

SEQ ID NO: 1133 - protein, 1098 aa, synthetic construct
  REGION 1..1098: note = MG74-65 effector
MQVRDDVILGLDIGVGSLGWALLEEDLQTGEQRLLQRQAPQGETSYALGVRLFNVPENAKTKELLNVKRRTARMQRRTTARRAQRMRRVRALLDSLGVLGVRDADAFHLGKGRGAQCDPWQLRREGLERRLEAREWAVVLLHIAKHRGFRSNSKTDSSGSDKEMGPVLQAVSNLQQEVEASGLTVGALLASRERRRNRADHTGAPRYDLCMLRSLQEDEVNILFTRQRELGNPLAGEDIRCRYAELAFAQRPLAPVSHMVGPCAFLEGERRAPRFAPTAELFRYVQALCTMRLRQETGEETPLSEEQRQAACAVFGSVQSVTYKKLRQVLRLPAGCRFVGLSYGVTEKGKVQDPEKADVVMRTGKCCQGTACLRGILGDAYDALHEQRLDEADAARLAATDALSAPAAALLARGMAGLRLTDALVRIVSELNDLGQIRAILALLPLPAPRIAALSQAAGEGKLGFFQGTARLSLRAMEAILPHMLACGEYAAACELAGFDPRAAQKTDVTDIRNPVVLRVFREVRRQFSAICREFGFLPGRVHMELLREVGKSGEERNRISRGLERRTKEKEAARKAVAQLLGKSPEAVSAGEVQRYELWRQQDGKCAYYMLWRHAGGERAYGNAMPQGSIPPAWLADGVNAVQVDHILPRSRTFDNSFHNLCLCCHAANQAKGGRTPWEWLGAAQPQAWHDFEQWVQSLPLKGLKKRNYLLRDLSAEVQGRFHARNLTDSSYVARLTLRWLEEEYARHDVPMQDAEGRTRRRFFARPGQVTDFLRRHWGVQALKKIDGQRSGDRHHALDALLVAACSEGMLQRMVRAFQREENGPERLHIPCPWQDFSATVGRALGSVFVSRVERGRTKGPLHEETLRAIREERQPDGETRRVLYERKAVARLTAADLDRIKDAARCPDVVAALRRWLDAGKPGDDLPRSAHGDIIRHVRVCAGEFSSGVVLQRGSGQAQASNGGIVRTDIYSRDGKFYMVPVYAKDVADRRLPLRACVAAKAEKDWREMTADYRFLFSLTPDCYVLTENRKGEVKEGYFIGSDRSTAAISLSLAHDRQQSLRGIGITTLKRFEKYRVDRFGRLSPVRREADPRGRS

SEQ ID NO: 1134 - protein, 1098 aa, synthetic construct
  REGION 1..1098: note = MG74-66 effector
MQVHDDVILGLDIGVGSLGWALLEEDLQTGEQRLLQRQTPQGETTYALGVRLFHVPENAKTKELLNVKRRTARMQRRTTARRAQRMRRVRALLDSLGVPGVRDADAFHLGKGRGAQCDPWQLRREGLERRLEAREWAVVLLHIAKHRGFRSNSKTDRSGSDKEMGQVLQAVSNLQQEVEASGLTVGALLASRERRRNRADHTGAPRYDLCMLRSLQENEVDILFTRQRELGNPLAGEEVRCRYAELAFAQRPLAPVSHMVGPCAFLEGERRAPRFAPTAELFRYVQALCNMRLRQETGEETPLSEEQRQAACAVFGSVQSVTYKKLRQVLRLPAGCRFAGLSYGVTEKGNVQDPEKADVVMRTGKCCQGTACLRGILGDAYEALHEQRLDEADAARLAATGALSAPAAALLARGMAGLRLTDAVARIVSELNDLDQIRALLALLPLPAPRIAALSQAAGEGKLGFFQGTARLSLRAMEAILPHMLACGEYAAACELAGFDPRAAQKTDVTDIRNPVVLRVFREVRRQFSAICREFGFLPGRVHVELLREVGKSGEERNRISRGLERRTKEKEAARKAVAQLLGKSPEAVSAGEVQRYELWRQQDGKCAYYMLWRHAGGERAYGNAMPQGSIPPAWLADGVNAVQVDHILPRSRTFDNSFHNLCLCCHAANQAKGGRTPWEWLGAAQPQAWHDFEQWVQSLPLKGLKKRNYLLRDLSAEVQGRFHARNLTDSSYVARLTLRWLEEEYARHDVPMQDAEGRTRRRFFARPGQVTDFLRRHWGVQALKKIDGQRSGDRHHALDALLVAACSEGMLQRMVRAFQREENGPERLHIPCPWQDFSTTVGRALGSVFVSRVERGRTKGPLHEETLRAIREERQPDGETRRVLYERKAVARLTVADLDRIKDAARCPDVVAALRRWLDAGKPGDDLPRSAHGDIIRHVRVRAGEFSSGVILQRGSGQAQAKNGGIVRTDIYSRDGKFYMVPVYAKDVADKRLPLRACVAHKDEKDWLELTEDYHFLFSLTPDCYVLTENRKGEVKEGYFEGPDRGSANISLSLAHDKKNTIRGIGIQNLKRFEKYRVDRFGRLSLVRREADPRGRS

SEQ ID NO: 1135 - protein, 859 aa, synthetic construct
  REGION 1..859: note = MG74-67 effector
MQVRDDVILGLDIGVGSLGWALLEEDPQTGEQRLLQRQTPQGETSYALGVRLFNVPENAKTKELLNVKRRTARMQRRTTARRAQRMRRVRALLDSLGVPGVRDADAFHLGKGRGAQYDPWQLRREGLERRLEAREWAVVLLHIAKHRGFRSNSKTDSSGSDKEMGQVLQAVSNLQQEVEASGLTVGALLASRERRRNRADHTGAPRYDLCMLRSLQEDEVNILFTRQRELGNPLAGEDIRCRYAELAFAQRPLAPVSHMVGPCAFLEGERRAPRFAPTAELFRYVQALCTMRLRQETGEETPLSEEQRQAACAVFGSVQSVTYKKLRQVLRLPAGCRFSGLSYGVTAKGSVQDPEKADVVMRTGKCCQGTACLRGILGDAYDALHEQRLDEADAARLAATDALSAPAAALLARGMAGLRLTDALVRIVSELNDLGQIRAILALLPLPAPRTAALSQAAGEGKLGFFQGTARLSLRAMEAILPHMLACGEYAAACELAGFDPRAAQKTDVTDIRNPVVLRVFREVRRQFSAICREFGFLPGRVHVELLREVGKSGEERNRISRGLERRTKKKEAARKAVAQLLGKSPEAVSAGEVQRYELWRQQDGKCAYYMLWRHAGGERAYGNAMPQGSIPPAWLADGVNAVQVDHILPRSRTFDNSFHNLCLCCHAANQAKGGRTPWEWLGAAQPQAWHDFEQWVQSLPLKGLKKRNYLLRDLSAEVQGRFHARNLTDSSYVARLTLRWLEEEYARHDVPMQDAAAFLRAAGAGDGLFAPPLGRAGPEKDRRPALRRPASRPGRPAGGRVQRRDAATHGTGLPAGGERPRTPAHPLPVAGLQRHGGAGPGLGLRLARGTRPHQGPPA

SEQ ID NO: 1136 - protein, 1098 aa, synthetic construct
  REGION 1..1098: note = MG74-68 effector
MQVRDDVILGLDIGVGSLGWALLEEDLQTGEQRLLQRQAPQGETSYALGVRLFNVPENAKTKELLNVKRRTARMQRRTTARRAQRMRRVRALLDSLGVPGVRDADAFHLGKGRGAQYDPWQLRREGLERRLEAREWAVVLLHIAKHRGFRSNSKTDSSGSDKEMGQVLQAVSNLQQEVEASGLTVGALLASRERRRNRADHTGAPRYDLCMLRSLQEDEVNILFTRQRELGNPLAGEDIRCRYAELAFAQRPLAPVSHMVGPCAFLEGERRAPRFAPTAELFRYVQALCTMRLRQETGEETPLSEEQRQAACAVFGSVQSVTYKKLRQVLRLPAGCRFSGLSYGVTAKGSVQDPEKADVVMRTGKCCQGTACLRGILGDAYDALHEQRLDEADAARLAATDALSAPAAALLARGMAGLRLTDALVRIVSELNDLGQIRAILALLPLPAPRTAALSQAAGEGKLGFFQGTARLSLRAMEAILPHMLACGEYAAACELAGFDPRAAQKTDVTDIRNPVVLRVFREVRRQFSAICREFGFLPGRVHVELLREVGKSGEERNRISRGLERRTKEKEAARKAVAQLLGKSPEAVSAGEVQRYELWRQQDGKCAYYMLWRHAGGERAYGNAMPQGSIPPAWLADGVNAVQVDHILPRSRTFDNSFHNLCLCCHAANQAKGGRTPWEWLGAAQPQAWHDFEQWVQSLPLKGLKKRNYLLRDLNAEVQGRFHARNLTDSSYVARLTLRWLEEEYARHDVPMQDAEGRTRRRFFARPGQVTDFLRRHWSVQALKKIDGQRSGDRHHALDALLVAACSEGMLQRMVRAFQREENGPERLHIPCPWQDFSATVGRALGSVFVSRVERGRTKGPLHEETLRAIREERQPDGETRRVLYERKAVARLTATDLDRIKDAARCPDVVAALRRWLDAGKPGDALPRSAHGDIIRHVRVCAGEFSSGVVLQRGSGQAQASNGGMVRTDIYSRDGKFYMVPVYAKDVADRRLPLRACVAAKAEKDWREMTADYRFLFSLTPDCYVLTENRKGEVKEGYFIGSDRSTAAISLSLAHDRQQSLRGIGITTLKRFEKYRVDRFGRLSPVRREADPRGRS

SEQ ID NO: 1137 - protein, 1098 aa, synthetic construct
  REGION 1..1098: note = MG74-69 effector
MQVHDDVILGLDIGVGSLGWALLEEDLQTGEQRLLQRQTPQGETTYALGVRLFHVPENAKTKELLNVKRRTARMQRRTTARRAQRMRRVRALLDSLGVPGVRDADAFHLGKGRGAQCDPWQLRREGLERRLEAREWAVVLLHIAKHRGFRSNSKTDRSGSDKEMGQVLQAVSNLQQEVEASGLTVGALLASRERRRNRADHTGAPRYDLCMLRSLQENEVDILFTRQRELGNPLAGEEVRCRYAELAFAQRPLAPVSHMVGPCAFLEGERRAPRFAPTAELFRYVQALCNMRLRQETGEETPLSEEQRQAACAVFGSVQSVTYKKLRQVLRLPAGCRFAGLSYGVTEKGNVQDPEKADVVMRTGKCCQGTACLRGILGDAYEALHEQRLDEADAARLAATGALSAPAAALLARGMAGLRLTDAVARIVSELNDLDQIRAVLALLPLAAPRIAALSQAAGEGKLGIFQGSARLSLRAMEAILPHMLACGEYAAACELAGFDPRAAQKTDVTDIRNPVVLRVFREVRRQFSAICREFGFLPGRVHVELLREVGKSGEERNRISRGLERRTKEKEAARKAVAQLLGKSPETVSAGEVQRYELWRQQDGKCAYYMLWRHAGGERAYGDAMPQGSIPPAWLADGVNAVQVDHILPRSRTFDNSFHNLCLCCHAANQAKGGRTPWEWLGAAQPQAWHDFEQWVQSLPLKGLKKRNYLLRDLNAEVQGRFHARNLTDSGYVARLTLRWLEEEYARHDVPMQDADGRTRRRFFARPGQVTDFLRRHWGVQALKKIDGQRSGDRHHALDALLVAACSEGMLQRMVRAFQREENGPERLHIPCPWQDFSATVGRALGSVFVSRVERGRTKGPLHEETLRAIREERQPDGETRRVLYERKAVARLTAADLDKIKDAARCPDVVAALRRWLNAGKPGDALPRSAHGDIIRHVRVCAGEFSSGVVLQRGSGQAQASNGGMVRTDIYSRDGKFYMVPVYAKDVADKRLPLRACVAAKAEKDWREMTADYRFLFSLTPDCYVLTENRKGEVKEGYFAGANRNTSAISLSLAHDKQNVIQGIGITTLKRFEKYRVDRFGRLSLVRREADPRGRS

SEQ ID NO: 1138 - protein, 1098 aa, synthetic construct
  REGION 1..1098: note = MG74-70 effector
MQVHDDVILGLDIGVGSLGWSLLEEDLQTGEQRLLQRQTPQGETTYALGVRLFNVPENAKTKELLNVKRRTARMQRRTTARRAQRMRRVRALLDSLGVPGVRDADAFHLGKGRGAQCDPWQLRREGLERRLEAREWAVVLLHIAKHRGFRSNSKTDRSGSDKEMGQVLQAVSNLQQEVEASGLTVGALLASRERRRNRADHTGAPRYDLCMLRSLQENEVDILFTRQRELGNPLAGEEVRCRYAELAFAQRPLAPVSHMVGPCAFLEGERRAPRFAPTAELFRYVQALCNMRLRQETGEETPLSEEQRQAACAVFGSVQSVTYKKLRQVLRLPAGCRFAGLSYGVTEKGNVQDPEKADVVMRTGKCCQGTACLRGILGDAYEALHEQRLDEADAARLAATGALSAPAAALLARGMAGLRLTDAVARIVSELNDLDQIRAVLALLPLAAPRIAALSQAAGEGKLGIFQGSARLSLRAMEAILPHMLACGEYAAACELAGFDPRAAQKTDVTDIRNPVVLRVFREVRRQFSAICREFGFLPGRVHVELLREVGKSGEERNRISRGLERRTKEKEAARKAVAQLLGKSPETVSAGEVQRYELWRQQDGKCAYYMLWRHAGGERAYGDAMPQGSIPPAWLADGVNAVQVDHILPRSRTFDNSFHNLCLCCHAANQAKGGRTPWEWLGAAQPQAWHDFEQWVQSLPLKGLKKRNYLLRDLNAEVQGRFHARNLTDSGYVARLTLRWLEEEYARHDVPMQDADGRTRRRFFARPGQVTDFLRRHWGVQALKKIDGQRSGDRHHALDALLVAACSEGMLQRMVRAFQREENGPERLHIPCPWQDFSATVGRALGSVFVSRVERGRTKGPLHEETLRAIREERQPDGETRRVLYERKAVARLTAADLDKIKDAARCPDVVAALRRWLDAGKPGDALPRSAHGDIIRHVRVCAGEFSSGVVLQRGSGQAQASNGGMVRTDIYSRDGKFYMVPVYAKDVADKRLPLRACVAAKAEKDWREMTADYRFLFSLTPDCYVLTENRKGEVKEGYFAGANRNTSAISLSLAHDKQNVIQGIGITTLKRFEKYRVDRFGRLSLVRREADPRGRS

SEQ ID NO: 1139 - protein, 1098 aa, synthetic construct
  REGION 1..1098: note = MG74-71 effector
MQVHDDVILGLDIGVGSLGWALLEEDLQTGEQRLLQRQTPQGETTYALGVRLFHVPENAKTKELLNVKRRTARMQRRTTARRAQRMRRVRALLDSLGVPGVRDADAFHLGKGRGAQCDPWQLRREGLERRLEAREWAVVLLHIAKHRGFRSNSKTDRSGSDKEMGQVLQAVSNLQQEVEASGLTVGALLASRERRRNRADHTGAPRYDLCMLRSLQENEVDILFTRQRELGNPLAGEEVRCRYAELAFAQRPLAPVSHMVGPCAFLEGERRAPRFAPTAELFRYVQALCNMRLRQETGEETPLSEEQRQAACAVFGSVQSVTYKKLRQVLRLPAGCRFAGLSYGVTEKGNVQDPEKADVVMRTGKCCQGTACLRGILGDAYEALHEQRLDEADAARLAATGALSAPAAALLARGMAGLRLTDAVARIVSELNDLDQIRAVLALLPLAAPRIAALSQAAGEGKLGIFQGSARLSLRAMEAILPHMLACGEYAAACELAGFDPRAAQKTDVTDIRNPVVLRVFREVRRQFSAICREFGFLPGRVHVELLREVGKSGEERNRISRGLERRTKEKEAARKAVAQLLGKSPETVSAGEVQRYELWRQQDGKCAYYMLWRHAGGERAYGDAMPQGSIPPAWLADGVNAVQVDHILPRSRTFDNSFHNLCLCCHAANQAKGGRTPWEWLGAAQPQAWHDFEQWVQSLPLKGLKKRNYLLRDLNAEVQGRFHARNLTDSGYVARLTLRWLEEEYARHDVPMQDADGRTRRRFFARPGQVTDFLRRHWGVQALKKIDGQRSGDRHHALDALLVAACSEGMLQRMVRAFQREENGPERLHIPCPWQDFSATVGRALGSVFVSRVERGRTKGPLHEETLRAIREERQPDGETRRVLYERKAVARLTAADLDKIKDAARCPDVVAALRRWLDAGKPGDALPRSAHGDIIRHVRVCAGEFSSGVVLQRGSGQAQASNGGMVRTDIYSRDGKFYMVPVYAKDVADRRLPLRACVAAKAEKDWREMTADYRFLFSLTPDCYVLTENRKGEVKEGYFIGSDRSTAAISLSLAHDRQQSLRGIGITTLKRFEKYRVDRFGRLSSVRREADPRGRS

SEQ ID NO: 1140 - protein, 1098 aa, synthetic construct
  REGION 1..1098: note = MG74-72 effector
MQVHDDVILGLDIGVGSLGWSLLEEDLQTGEQRLLQRQTPQGETTYALGVRLFHVPENAKTKELLNVKRRTARMQRRTTARRAQRMRRVRALLDSLGVPGVRDADAFHLGKGRGAQCDPWQLRREGLERRLEAREWAVVLLHIAKHRGFRSNSKTDRSGSDKEMGQVLQAVSNLQQEVEASGLTVGALLASRERRRNRADHTGAPRYDLCMLRSLQENEVDILFTRQRELGNPLAGEEVRCRYAELAFAQRPLAPVSHMVGPCAFLEGERRAPRFAPTAELFRYVQALCNMRLRQETGEETPLSEEQRQAACAVFGSVQSVTYKKLRQVLRLPAGCRFAGLSYGVTEKGNVQDPEKADVVMRTGKCCQGTACLRGILGDAYEALHEQRLDEADAARLAATGALSAPAAALLARGMAGLRLTDAVARIVSELNDLDQIRAVLALLPLAAPRIAALSQAAGEGKLGIFQGTARLSLRAMEAILPHMLACGEYAAACELAGFDPRAAQKTDVTDIRNPMVLRVFREVRRQFSAICREFGFLPGRVHVELLREVGKSGEERNRISRGLERRTKEKEAARKAVAQLLGKSPETVSAGEVQRYELWRQQDGKCAYYMLWRHAGGERAYGDAMPQGSIPPDWLADGVNAVQVDHILPRSRTFDNSFHNLCLCCHAANQAKGGRTPWEWLGAAQPQAWHDFEQWVQSLPLKGLKKRNYLLRDLNAEVQGRFHARNLTDSGYVARLTLRWLEEEYARHDVPMQDADGRTRRRFFARPGQVTDFLRRHWGVQALKKIDGQRSGDRHHALDALLVAACSEGMLQRMVRAFQREENGPERLHIPCPWQDFSATVGRALGSVFVSRVERGRTKGPLHEETLRAIREERQPDGETRRVLYERKAVARLTAADLDKIKDAARCPDVVAALRRWLDAGKPGDALPRSAHGDIIRHVRVCAGEFSSGVVLQRGSGQAQASNGGMVRTDIYSRDGKFYMVPVYAKDVADKRLPLRACVAHKDEKDWPEMTADYRFLFSLTPDCYVLTENRKGEIKEGYFSGADRSSANISLTLAHDRKSSIRGIGIQKLRRFEKYRVDRFGRLSPVRREADPRGRP

SEQ ID NO: 1141 - protein, 1098 aa, synthetic construct; identical to SEQ ID NO: 327
  REGION 1..1098: note = MG74-73 effector

SEQ ID NO: 1142 - protein, 1098 aa, synthetic construct
  REGION 1..1098: note = MG74-74 effector
MQVHDDVILGLDIGVGSLGWALLEEDLQTGEQRLLQRQTPQGETTYALGVRLFHVPENAKTKELLNVKRRTARMQRRTTARRAQRMRRVRALLDSLGVPGVRDADAFHLGKGRGAQCDPWQLRREGLERRLEAREWAVVLLHIAKHRGFRSNSKTDRSGSDKEMGQVLQAVSNLQQEVEASGLTVGALLASRERRRNRADHTGAPRYDLCMLRSLQENEVDILFTRQRELGNPLAGEEVRCRYAELAFAQRPLAPVSHMVGPCAFLEGERRAPRFAPTAELFRYVQALCNMRLRQETGEETPLSEEQRQAACAVFGSVQSVTYKKLRQVLRLPAGCRFAGLSYGVTEKGNVQDPEKADVVMRTGKCCQGTACLRGILGDAYEALHEQRLDEADAARLAATGALSAPAAALLARGMAGLRLTDAVARIVSELNDLDQIRAVLALLPLAAPWIAALSQAAGEGKLGIFQGSARLSLRAMEAILPHMLACGEYAAACELAGFDPRAAQKTDVTDIRNPVVLRVFREVRRQFSAICREFGFLPGRVHVELLREVGKSGEERNRISRGLERRTKEKEAARKAVAQLLGKSPETVSAGEVQRYELWRQQDGKCAYYMLWRHAGGERAYGDAMPQGSIPPAWLADGVNAVQVDHILPRSRTFDNSFHNLCLCCHAANQAKGGRTPWEWLGAAQPQAWHDFEQWVQSLPLKGLKKRNYLLRDLNAEVQGRFHARNLTDSGYVARLTLRWLEEEYARHDVPMQDADGRTRRRFFARPGQVTDFLRRHWGVQALKKIDGQRSGDRHHALDALLVAACSEGMLQRMVRAFQREENGPERLHIPCPWQDFSATVGRALGSVFVSRVERGRTKGPLHEETLRAIREERQPDGETRRVLYERKAVARLTAADLDKIKDAARCPDVVAALRRWLDAGKPGDALPRSAHGDIIRHVRVCAGEFSSGVVLQRGSGQAQASNGGMVRTDIYSRDGKFYMVPVYAKDVADKRLPLRACVAAKAEKDWREMTADYRFLFSLTPDCYVLTENRKGEVKEGYFAGANRNTSAISLSLAHDKQNVIQGIGITTLKRFEKYRVDRFGRLSLVRREADPRGRS

SEQ ID NO: 1143 - protein, 973 aa, synthetic construct
  REGION 1..973: note = MG74-75 effector
GLERRLEAREWAVVLLHIAKHRGFRSNSKTDRSGSDKEMGQVLQAVSNLQQEVEASGLTVGALLASRERRRNRADHTGAPRYDLCMLRSLQEDEVDILFTRQRELGNPLAGEDVRRRYAELAFAQRPLAPVSHMVGACAFLEGERRAPRFAPTAELFRYVQALCNMRLRQETGEETPLSEEQRLAACSLFGSVQSVTYKKLRQVLRLPAGCRFAGLSYGVTAKGSVQDPEKADVVMRTGKCCQGTACLRGILGDAYDALHEQRLDEADAARLAATDALSAPAAALLARGMAGLRLTDALVRIVSELNDLGQIRALLALLPLPAPRIAALSQAAGEGKLGFFQGTARLSLRAMEAILPHMLACGEYAAACELAGFDPRAAQKTDVTDIRNPVVLRVFREVRRQFSAICREFGFLPGRVHVELLREVGKSGEERNRISRGLERRTKEKEAARKAVAELLHKSPEAVSAGEVQRYELWRQQDGKCAYYMLWRHAGGERAYGDAMPQGSIPPAWLADGVNAVQVDHILPRSRTFDNSFHNLCLCCHAANQAKGGRTPWEWLGAAQPQAWHDFEQWVQSLPLKGLKKRNYLLRDLSAEVQGRFHARNLTDSGYVARLTLRWLEEEYARHDVPMQDAEGRTRRRFFARPGQVTDFLRRHWGVQALKKIGGQRSGDRHHALDALLVAACSEGMLQRMVRAFQREENGPERLHIPCPWQDFSTTVGRALGSVFVSRVERGRTKGPLHEETLRAIREERQPDGETRRVLYERKAVARLTVADLDRIKDAARCPDVVAALRRWLDAGKPGDDLPRSAHGDIIRHVRVRAGEFSSGVILQRGSGQAQAKNGGIVRTDIYSRNGKFYMVPVYAKDVADKRLPLRACVAHKDEKDWLELTEDYHFLFSLTPDCYVLTENRKGEVKEGYFEGPDRGSANISLSLAHDKKNTIRGIGIQNLKRFEKYRVDRFGRLSLVRREADPRGRL

SEQ ID NO: 1144 - protein, 684 aa, synthetic construct
  REGION 1..684: note = MG74-76 effector
MAGLRLTDALVRIVSELNDLGQIRAILALLPLPAPRIAALSQAAGEGKLGFFQGTARLSLRAMEAILPHMQACGEYAAACELAGFDPRAAQKTDLTDIRNPVVLRVFREVRRQFSAICREFGFLPGRVHVELLREVGKSGEERNRISRGLERRTKEKEAARKAVAQLLGKSPEAVSAGEVQRYELWRQQDGKCAYYMLWRHAGGERAYGNAMPQGSIPPAWLADGVNAVQVDHILPRSRTFDNSFHNLCLCCHAANQAKGGRTPWEWLGAAQPQAWHDFEQWVQSLPLKGLKKRNYLLRDLSAEVQGRFHARNLTDSSYVARLTLRWLEEEYARHDVPMQDAEGRTRRRFFARPGQVTDFLRRHWGVQALKKIDGQRSGDRHHALDALLVAACSEGMLQRMVRAFQREENGPERLHIPCPWQDFSATVGRALGSVFVSRVERGRTKGPLHEETLRAIREERQPDGETRRVLYERKAVARLTAADLDRIKDAARCPDVVAALRRWLDAGKPGDALPRSAHGDIIRHVRVCAGEFSSGVVLQRGSGQAQASNGGMVRTDIYSRDGKFYMVPVYAKDVADRRLPLRACVAAKAEKDWREMTADYRFLFSLTPDCYVLTENRKGEVKEGYFIGSDRSTAAISLSLAHDRQQSLRGIGITTLKRFEKYRVDRFGRLSSVRREADPRGRS

SEQ ID NO: 1145 - protein, 1098 aa, synthetic construct; identical to SEQ ID NO: 330
  REGION 1..1098: note = MG74-77 effector

SEQ ID NO: 1146 - protein, 1098 aa, synthetic construct; identical to SEQ ID NO: 306
  REGION 1..1098: note = MG74-78 effector

SEQ ID NO: 1147 - protein, 1098 aa, synthetic construct; identical to SEQ ID NO: 311
  REGION 1..1098: note = MG74-79 effector

SEQ ID NO: 1148 - protein, 659 aa, synthetic construct
  REGION 1..659: note = MG74-80 effector
MLALLPLAAPRIAALSQAAGEGKLGIFQGSARLSLRAMEAILPHMLACGEYAAACELAGFDPRAAQKTDVTDIRNPVVLRVFREVRRQFSAICREFGFLPGRVHVELLREVGKSGEERNRISRGLERRTKEKEAARKAVAQLLGKSPETVSAGEVQRYELWRQQDGKCAYYMLWRHAGGERAYGDAMPQGSIPPDWLADGVNAVQVDHILPRSRTFDNSFHNLCLCCHAANQAKGGRTPWEWLGAAQPQAWHDFEQWVQSLPLKGLKKRNYLLRDLNAEVQGRFHARNLTDSGYVARLTLRWLEEEYARHDVPMQDADGRTRRRFFARPGQVTDFLRRHWGVQALKKIDGQRSGDRHHALDALLVAACSEGMLQRMVRAFQREENGPERLHIPCPWQDFSATVGRALGSVFVSRVERGRTKGPLHEETLRAIREERQPDGETRRVLYERKAVARLTAADLDRIKDAARCPDVVAALRRWLDAGKPGDALPRSAHGDIIRHVRVCAGEFSSGVVLQRGSGQAQASNGGMVRTDIYSRDGKFYMVPVYAKDVADRRLPLRACVAAKAEKDWREMTADYRFLFSLTPDCYVLTENRKGEVKEGYFIGSDRSTAAISLSLAHDRQQSLRGIGITTLKRFEKYRVDRFGRLSSVRREADPRGRS

SEQ ID NO: 1149 - protein, 682 aa, synthetic construct
  REGION 1..682: note = MG74-81 effector
GLRLTDAVARIVSELNDLDQIRAVLALLPLAAPRIAALSQAAGEGKLGIFQGTARLSLRAMEAILPHMLACGEYAAACELAGFDPRAAQKTDVTDIRNPVVLRVFREVRRQFSAICREFGFLPGRVHVELLREVGKSGEERNRISRGLERRTKEKEAARKAVAQLLGKSPETVSAGEVQRYELWRQQDGKCAYYMLWRHAGGERAYGDAMPQGSIPPDWLADGVNAVQVDHILPRSRTFDNSFHNLCLCCHAANQAKGGRTPWEWLGAAQPQAWHDFEQWVQSLPLKGLKKRNYLLRDLNAEVQGRFHARNLTDSGYVARLTLRWLEEEYARHDVPMQDADGRTRRRFFARPGQVTDFLRRHWGVQALKKIDGQRSGDRHHALDALLVAACSEGMLQRMVRAFQREENGPERLHIPCPWQDFSATVGRALGSVFVSRVERGRTKGPLHEETLRAIREERQPDGETRRVLYERKAVARLTAADLDKIKDAARCPDVVAALRRWLDAGKPGDALPRSAHGDIIRHVRVCAGEFSSGVVLQRGSGQAQASNGGMVRTDIYSRDGKFYMVPVYAKDVADKRLPLRACVAAKAEKDWREMTADYRFLFSLTPDCYVLTENRKGEVKEGYFAGANRNTSAISLSLAHDKQNVIQGIGITTLKRFEKYRVDRFGRLSLVRREADPRGRS

SEQ ID NO: 1150 - protein, 605 aa, synthetic construct
  REGION 1..605: note = MG74-82 effector
CELAGFDPRAAQKTDVTDIRNPVVLRVFREVRRQFSAICREFGFLPGRVHVELLREVGKSGEERNRISRGLERRTKEKEAARKAVAQLLGKSPEAVSAGEVQRYELWRQQDGKCAYYMLWRHAGGERAYGDAMPQGSIPPAWLADGVNAVQVDHILPRSRTFDNSFHNLCLCCHAANQAKGGRTPWEWLGAAQPQAWHDFEQWVQSLPLKGLKKRNYLLRDLNAEVQGRFHARNLTDSGYVARLTLRWLEEEYARHDVPMQDADGRTRRRFFARPGQVTDFLRRHWGVQALKKIDGQRSGDRHHALDALLVAACSEGMLQRMVRAFQREENGPERLHIPCPWQDFSTTVGRALGSVFVSRVERGRTKGPLHEETLRAIREERQPDGETRRVLYERKAVARLTVADLDRIKDAARCPDVVAALRRWLDAGKPGDDLPRSAHGDIIRHVRVRAGEFSSGVILQRGSGQAQAKNGGIVRTDIYSRDGKFYMVPVYAKDVADKRLPLRACVAHKDEKDWLELTEDYHFLFSLTPDCYVLTENRKGEVKEGYFEGPDRGSANISLSLAHDKKNTIRGIGIQNLKRFEKYRVDRFGRLSLVRREADPRGRS

SEQ ID NO: 1151 - protein, 589 aa, synthetic construct
  REGION 1..589: note = MG74-83 effector
TDIRNPVVLRVFREVRRQFSAICREFGFLPGRVHVELLREVGKSGEERNRISRGLERRTKEKEAARKAVAQLLGKSPEAVSAGEVQRYELWRQQDGKCAYYMLWRHAGGERAYGNAMPQGSIPPAWLADGVNAVQVDHILPRSRTFDNSFHNLCLCCHAANQAKGGRTPWEWLGAAQPQAWHDFEQWVQSLPLKGLKKRNYLLRDLSAEVQGRFHARNLTDSSYVARLTLRWLEEEYARHDVPMQDAEGRTRRRFFARPGQVTDFLRRHWGVQALKKIDGQRSGDRHHALDALLVAACSEGMLQRMVRAFQREENGPERLHIPCPWQDFSTTVGRALGSVFVSRVERGRTKGPLHEETLRAIREERQPDGETRRVLYERKAVARLTVADLDRIKDAARCPDVVAALRRWLDAGKPGDDLPRSAHGDIIRHVRVRAGEFSSGVILQRGSGQAQAKNGGIVRTDIYSRDGKFYMVPVYAKDVADKRLPLRACVAHKDEKDWLELTEDYHFLFSLTPDCYVLTENRKGEVKEGYFEGPDRGSANISLSLAHDKKNTIRGIGIQNLKRFEKYRVDRFGRLSLVRREADPRGRS

SEQ ID NO: 1152 - protein, 672 aa, synthetic construct
  REGION 1..672: note = MG74-84 effector
IVSELNDLDQIRAVLALLPLAAPRIAALSQAAGEGKLGIFQGSARLSLRAMEAILPHMLACGEYAAACELAGFDPRAAQKTDVTDIRNPVVLRVFREVRRQFSAICREFGFLPGRVHVELLREVGKSGEERNRISRGLERRTKEKEAARKAVAQLLGKSPETVSAGEVQRYELWRQQDGKCAYYMLWRHAGGERAYGDAMPQGSIPPAWLADGVNAVQVDHILPRSRTFDNSFHNLCLCCHAANQAKGGRTPWEWLGAAQPQAWHDFEQWVQSLPLKGLKKRNYLLRDLSAEVQGRFHARNLTDSSYVARLTLRWLEEEYARHDVPMQDAEGRTRRRFFARPGQVTDFLRRHWGVQALKKIDGQRSGDRHHALDALLVAACSEGMLQRMVRAFQREENGPERLHIPCPWQDFSTTVGRALGSVFVSRVERGRTKGPLHEETLRAIREERQPDGETRRVLYERKAVARLTVADLDRIKDAARCPDVVAALRRWLDAGKPGDDLPRSAHGDIIRHVRVRAGEFSSGVILQRGSGQAQAKNGGIVRTDIYSRDGKFYMVPVYAKDVADKRLPLRACVAHKDEKDWLELTEDYHFLFSLTPDCYVLTENRKGEVKEGYFEGPDRGSANISLSLAHDKKNTIRGIGIQNLKRFEKYRVDRFGRLSLVRREADPRGRS

SEQ ID NO: 1153 - protein, 685 aa, synthetic construct
  REGION 1..685: note = MG74-85 effector
FSVGLRLTDAVARIVSELNDLDQIRAVLALLPLAAPRIAALSQAAGEGKLGIFQGSARLSLRAMEAILPHMLACGEYAAACELAGFDPRAAQKTDVTDIRNPVVLRVFREVRRQFSAICREFGFLPGRVHVELLREVGKSGEERNRISRGLERRTKEKEAARKAVAQLLGKSPETVSAGEVQRYELWRQQDGKCAYYMLWRHAGGERAYGDAMPQGSIPPAWLADGVNAVQVDHILPRSRTFDNSFHNLCLCCHAANQAKGGRTPWEWLGAAQPQAWHDFEQWVQSLPLKGLKKRNYLLRDLNAEVQGRFHARNLTDSGYVARLTLRWLEEEYARHDVPMQDADGRTRRRFFARPGQVTDFLRRHWGVQALKKIDGQRSGDRHHALDALLVAACSEGMLQRMVRAFQREENGPERLHIPCPWQDFSATVGRALGSVFVSRVERGRTKGPLHEETLRAIREERQPDGETRRVLYERKAVARLTAADLDKIKDAARCPDVVAALRRWLDAGKPGDALPRSAHGDIIRHVRVCAGEFSSGVVLQRGSGQAQASNGGMVRTDIYSRDGKFYMVPVYAKDVADKRLPLRACVAAKAEKDWREMTADYRFLFSLTPDCYVLTENRKGEVKEGYFAGANRNTSAISLSLAHDKQNVIQGIGITTLKRFEKYRVDRFGRLSLVRREADPRGRS

SEQ ID NO: 1154 - protein, 673 aa, synthetic construct
  REGION 1..673: note = MG74-86 effector
RIVSELNDLDQIRAVLALLPLAAPRIAALSQAAGEGKLGIFQGSARLSLRAMEAILPHMLACGEYAAACELAGFDPRAAQKTDVTDIRNPVVLRVFREVRRQFSAICREFGFLPGRVHVELLREVGKSGEERNRISRGLERRTKEKEAARKAVAQLLGKSPETVSAGEVQRYELWRQQDGKCAYYMLWRHAGGERAYGDAMPQGSIPPAWLADGVNAVQVDHILPRSRTFDNSFHNLCLCCHAANQAKGGRTPWEWLGAAQPQAWHNFEQWVQSLPLKGLKKRNYLLRDLNAEVQGRFHARNLTDSGYVARLTLRWLEEEYARHDVPMQDADGRTRRRFFARPGQVTDFLRRHWGVQALKKIDGQRSGDRHHALDALLVAACSEGMLQRMVRAFQREENGPERLHIPCPWQDFSATVGRALGSVFVSRVERGRTKGPLHEETLRAIREERQPDGETRRVLYERKAVARLTAADLDKIKDAARCPDVVAALRRWLDAGKPGDALPRSAHGDIIRHVRVCAGEFSSGVVLQRGSGQAQASNGGMVRTDIYSRDGKFYMVPVYAKDVADKRLPLRACVAAKAEKDWREMTADYRFLFSLTPDCYVLTENRKGEVKEGYFAGANRNTSAISLSLAHDKQNVIQGIGITTLKRFEKYRVDRFGRLSLVRREADPRGRS

SEQ ID NO: 1155 - protein, 595 aa, synthetic construct
  REGION 1..595: note = MG74-87 effector
AQKTDVTDIRNPVVLRVFREVRRQFSAICREFGFLPGRVHVELLREVGKSGEERNRISRGLERRTKEKEAARKAVAQLLGKSPETVSAGEVQRYELWRQQDGKCAYYMLWRHAGGERAYGDAMPQGSIPPDWLADGVNAVQVDHILPRSRTFDNSFHNLCLCCHAANQAKGGRTPWEWLGAAQPQAWHDFEQWVQSLPLKGLKKRNYLLRDLNAEVQGRFHARNLTDSGYVARLTLRWLEEEYARHDVPMQDADGRTRRRFFARPGQVTDFLRRHWGVQALKKIDGQRSGDRHHALDALLVAACSEGMLQRMVRAFQREENGPERLHIPCPWQDFSATVGRALGSVFVSRVERGRTKGPLHEETLRAIREERQPDGETRRVLYERKAVARLTAADLDKIKDAARCPDVVAALRRWLDAGKPGDALPRSAHGDIIRHVRVCAGEFSSGVVLQRGSGQAQASNGGMVRTDIYSRDGKFYMVPVYAKDVADKRLPLRACVAAKAEKDWREMTADYRFLFSLTPDCYVLTENRKGEVKEGYFAGANRNTSAISLSLAHDKQNVIQGIGITTLKRFEKYRVDRFGRLSLVRREADPRGRS

SEQ ID NO: 1156 - protein, 920 aa, synthetic construct
  REGION 1..920: note = MG74-88 effector
EASGLTVGALLASRERRRNRADHTGAPRYDLCMLRSLQENEVDILFTRQRELGNPLAGEEVRCRYAELAFAQRPLAPVSHMVGPCAFLEGERRAPRFAPTAELFRYVQALCNMRLRQETGEETPLSEEQRQAACAVFGSVQSVTYKKLRQVLRLPAGCRFAGLSYGVTEKGNVQDPEKADVVMRTGKCCQGTACLRGILGDAYEALHEQRLDEADAARLAATGALSAPAAALLARGMAGLRLTDAVARIVSELNDLDQIRAVLALLPLAAPRIAALSQAAGEGKLGIFQGSARLSLRAMEAILPHMLACGEYAAACELAGFDPRAAQKTDVTDIRNPVVLRVFREVRRQFSAICREFGFLPGRVHVELLREVGKSGEERNRISRGLERRTKEKEAARKAVAQLLGKSPETVSAGEVQRYELWRQQDGKCAYYMLWRHAGGERAYGDAMPQGSIPPAWLADGVNAVQVDHILPRSRTFDNSFHNLCLCCHAANQAKGGRTPWEWLGAAQPQAWHNFEQWVQSLPLKGLKKRNYLLRDLNAEVQGRFHARNLTDSGYVARLTLRWLEEEYARHDVPMQDADGRTRRRFFARPGQVTDFLRRHWGVQALKKIDGQRSGDRHHALDALLVAACSEGMLQRMVRAFQREENGPERLHIPCPWQDFSATVGRALGSVFVSRVERGRTKGPLHEETLRAIREERQPDGETRRVLYERKAVARLTAADLDKIKDAARCPDVVAALRRWLNAGKPGDALPRSAHGDIIRHVRVCAGEFSSGVVLQRGSGQAQASNGGMVRTDIYSRDGKFYMVPVYAKDVADKRLPLRACVAAKAEKDWREMTADYRFLFSLTPDCYVLTENRKGEVKEGYFAGANRNTSAISLSLAHDKQNVIQGIGITTLKRFEKYRVDRFGRLSLVRREADPRGRS

SEQ ID NO: 1157 - protein, 860 aa, synthetic construct
  REGION 1..860: note = MG74-89 effector
VRCRYVELAFAQRPLAPVSHMVGPCAFLEGERRAPRFAPTAELFRYVQALCNMRLRQETGEETPLSEEQRQAACAVFGNVQSVTYKKLRQVLRLPAGCRFAGLSYGVTEKGNVQDPEKADVVMRTGKCCQGTACLRGILGDAYEALHEQRLDEADAARLAATGALSAPAAALLARGMAGLRLTDAVARIVSELNDLDQIRAVLALLPLAAPRIAALSQAAGEGKLGIFQGSARLSLRAMEAILPHMLACGEYAAACELAGFDPRAAQKTDVTDIRNPVVLRVFREVRRQFSAICREFGFLPGRVHVELLREVGKSGEERNRISRGLERRTKEKEAARKAVAQLLGKSPETVSAGEVQRYELWRQQDGKCAYYMLWRHAGGERAYGDAMPQGSIPPAWLADGVNAVQVDHILPRSRTFDNSFHNLCLCCHAANQAKGGRTPWEWLGAAQPQAWHDFEQWVQSLPLKGLKKRNYLLRDLNAEVQGRFHARNLTDSGYVARLTLRWLEEEYARHDVPMQDADGRTRRRFFARPGQVTDFLRRHWGVQALKKIDGQRSGDRHHALDALLVAACSEGMLQRMVRAFQREENGPERLHIPCPWQDFSATVGRALGSVFVSRVERGRTKGPLHEETLRAIREERQPDGETRRVLYERKAVARLTAADLDKIKDAARCPDVVAALRRWLDAGKPGDALPRSAHGDIIRHVRVCAGEFSSGVVLQRGSGQAQASNGGMVRTDIYSRDGKFYMVPVYAKDVADKRLPLRACVAHKDEKDWREMTADYRFLFSLTPDCYVLTENRKGEVKEGYFAGANRNTSAISLSLAHDKQNVIQGIGITTLKRFEKYRVDRFGRLSPVRREADPRGRS

SEQ ID NO: 1158 - protein, 672 aa, synthetic construct
  REGION 1..672: note = MG74-90 effector
IVSELNDLDQIRAVLALLPLAAPRIAALSQAAGEGKLGIFQGSARLSLRAMEAILPHMLACGEYAAACELAGFDPRAAQKTDVTDIRNPVVLRVFREVRRQFSAICREFGFLPGRVHVELLREVGKSGEERNRISRGLERRTKEKEAARKAVAQLLGKSPETVSAGEVQRYELWRQQDGKCAYYMLWRHAGGERAYGDAMPQGSIPPAWLADGVNAVQVDHILPRSRTFDNSFHNLCLCCHAANQAKGGRTPWEWLGAAQPQAWHDFEQWVQSLPLKGLKKRNYLLRDLNAEVQGRFHARNLTDSGYVARLTLRWLEEEYARHDVPMQDADGRTRRRFFARPGQVTDFLRRHWGVQALKKIDGQRSGDRHHALDALLVAACSEGMLQRMVRAFQREENGPERLHIPCPWQDFSATVGRALGSVFVSRVERGRTKGPLHEETLRAIREERQPDGETRRVLYERKAVAKLTAADLDKIKDAARCPDVVAALRRWLNAGKPGDALPRSAHGDIIRHVRVCAGEFSSGVVLQRGSGQAQASNGGMVRTDIYSRDGKFYMVPVYAKDVADKRLPLRACVAAKAEKDWREMTADYRFLFSLTPDCYVLTENRKGEVKEGYFAGANRNTSAISLSLAHDKQNVIQGIGITTLKRFEKYRVDRFGRLSLVRREADPRGRS

SEQ ID NO: 1159 - protein, 1098 aa, synthetic construct
  REGION 1..1098: note = MG74-91 effector
MQVRDDVILGLDIGVGSLGWALLEEDLQTGEQRLLQRQAPQGETSYALGVRLFNVPENAKTKELLNVKRRTARMQRRTTARRAQRMRRVRALLDSLGVPGVRDADAFHLGKGRGAQCDPWQLRREGLERRLEAREWAVVLLHIAKHRGFRSNSKTDSSGSDKEMGQVLQAVSNLQQEVEASGLTVGALLASRERRRNRADHTGAPRYDLCMLRSLQEDEVNILFTRQRELGNPLAGEDIRCRYAELAFAQRPLAPVSHMVGPCAFLEGERRAPRFAPTAELFRYVQALCTMRLRQETGEETPLSEEQRQAACAVFGSVQSVTYKKLRQVLRLPAGCRFVGLSYGVTEKGKVQDPEKADVVMRTGKCCQGTACLRGILGDAYDALHEQRLDEADAVRLAATDALSAPAAALLARGMAGLRLTDALVRIVSELNDLGQIRALLALLPLPAPRIAALSQAAGEGKLGFFQGTARLSLRAMEAILPHMLACGEYAAACELAGFDPRAAQKTDVTDIRNPVVLRVFREVRRQFSAICREFGFLPGRVHVELLREVGKSGEERNRISRGLERRTKEKEAARKAVAQLLGKSPEAVSAGEVQRYELWRQQDGKCAYYMLWRHAGGERAYGNAMPQGSIPPAWLADGVNAVQVDHILPRSRTFDNSFHNLCLCCHAANQAKGGRTPWEWLGAAQPQAWHDFEQWVQSLPLKGLKKRNYLLRDLSAEVQGRFHARNLTDSSYVARLTLRWLEEEYARHDVPMQDAEGRTRRRFFARPGQVTDFLRRHWGVQALKKIGGQRSGDRHHALDALLVAACSEGMLQRMVRAFQREENGPERLHIPCPWQDFSTTVGRALGSVFVSRVERGRTKGPLHEETLRAIREERQPDGETRRVLYERKAVARLTVADLDRIKDAARCPDVVAALRRWLDAGKPGDDLPRSAHGDIIRHVRVRAGEFSSGVILQRGSGQAQAKNGGIVRTDIYSRDGKFYMVPVYAKDVADKRLPLRACVAHKDEKDWLELTEDYHFLFSLTPDCYVLTENRKGEVKEGYFEGPDRGSANISLSLAHDKKNTIRGIGIQNLKRFEKYRVDRFGRLSLVRREADPRGRP

SEQ ID NO: 1160 - protein, 1098 aa, synthetic construct
  REGION 1..1098: note = MG74-92 effector
MQVHDDVILGLDIGVGSLGWALLEEDLQTGEQRLLQRQTPQGETTYALGVRLFHVPENPKTKELLNVKRRTARMQRRTTARRAQRMRRVRALLDSLGVPGVRDADAFHLGKGRGAQCDPWQLRREGLERRLEAREWAVVLLHIAKHRGFRSNSKTDRSGSDKEMGQVLQAVSNLQQEVEASGLTVGALLASRERRRNRADHTGAPRYDLCMLRSLQENEVDILFTRQRELGNPLAGEEVRCRYAELAFAQRPLAPVSHMVGPCAFLEGERRAPRFAPTAELFRYVQALCNMRLRQETGEETPLSEEQRQAACAVFGSVQSVTYKKLRQVLRLPAGCRFAGLSYGVTEKGNVQDPEKADVVMRTGKCCQGTACLRGILGDAYEALHEQRLDEADAARLAATGALSAPAAALLARGMAGLRLTDAVARIVSELNDLDQIRAVLALLPLAAPRIAALSQAAGEGKLGIFQGTARLSLRAMEAILPHMLACGEYAAACELAGFDPRAAQKTDVTDIRNPVVLRVFREVRRQFSAICREFGFLPGRVHVELLREVGKSGEERNRISRGLERRTKEKEAARKAVAQLLGKSPETVSAGEVQRYELWRQQDGKCAYYMLWRHAGGERAYGDAMPQGSIPPDWLADGVNAVQVDHILPRSRTFDNSFHNLCLCCHAANQAKGGRTPWEWLGAAQPQAWHDFEQWVQSLPLKGLKKRNYLLRDLNAEVQGRFHARNLTDSGYVARLTLRWLEEEYARHDVPMQDADGRTRRRFFARPGQVTDFLRRHWGVQALKKIDGQRSGDRHHALDALLVAACSEGMLQRMVRAFQREENGPERLHIPCPWQDFSATVGRALGSVFVSRVERGRTKGPLHEETLRAIREERQPDGETRRVLYERKAVARLTAADLDKIKDAARCPDVVAALRRWLDAGKPGDALPRSAHGDIIRHVRVCAGEFSSGVILQRGSGQAQAKNGGIVRTDIYSRDGKFYMVPVYAKDVADKRLPLRACVAHKDEKDWLELTEDYHFLFSLTPDCYVLTENRKGEVKKGYFEGPDRGSANISLSLAHDKKNTIRGIGIQNLKRFEKYRVDRFGRLSLVRREADPRGRS

SEQ ID NO: 1161 - protein, 1118 aa, synthetic construct
  REGION 1..1118: note = MG86-48 effector
MKNILSLDLGITSVGYSILKQLDTDKYSLVDYGVSMFDKPYDEKNNSKKILHSEVTSFKKLNDLKKERKRNLALLFEEFGLGDKDYFLYQEKQNVYKNKWHIRAKKAFCERLKVEELFTILYSIAKRRGYKSLETSDLLEELCKELEIPFEEDKKTKNNEEKGKIKSALKRVEELKERYPQKTVAAIIYEEELKNPTPVFRNHDNYRYMIRREDINDEIKKIVLAQKEFGLFDKDFDVDKFIKRLIKTIDDQKESTNNKDLLANCEFYKEHKVAHQYSLITDIFKMYQAVSNITFNSKPEIKITKEQIKLIADDFFKKVRKGKKIDSIKFKDVRKILNLPDDIKIFNKEDFSVKNGKKQDNYIIKFHFVNNLSKIDNTFILKAFEKENPYEELKEIFDTLGFEKSPKIIYENLKNKIDNKTIVELIKNKTGSSTRISSYAMVKFIPYFEQGYTLDDIKKELGLIRNEDYSKFQKGIKYLSVSQFENDDSLLINNHPVKSIVSAALRVTKHLHVKHGPFDEIKVESARELSQNEETRKAIDKANKELEKQIDNIMENEEYQEIAQRYGRNLRKYARKILMWLEQDKLDIYTGKNIGISEIFSNTVDIDHIVPQSLGGLSVKHNLVLTHKDSNLKKSNQLPINFVEDKNAFENRVEHLFRERKINWKKKVNLLATTFDETFKDTFESKELRATSYVEALTAQVLKRYYPFPNEKKQKDGSAVRHIQGRATSNIRKLLHVKTKVRDTNIHHAVDAILIGLTNQSWLQKLSNTFRENFGKIDDEARANIKKATPLIDGIEPSELIGMIEKGYNKFGKESVFYEDIWGKTKTVYFWVSKKPMVSKIHKDTIYAKKENGIYTVREKIIDKFVSLKVSSKTKVDEFYKKFKKEILYKMYLHEINQNDVIYKTVQKRGDEIAEMLKSFERLDANDKEALAEAKDELNNLIHKPLIDNNGNEIRRVQFYQTNLTGFEIRGGLATKAKTFIGFKAKLKDGKFKYERIDMSNIQRIKKKKDTGFKVYKNDVVFFTYPDGSCKGGRIVSFLDEKNLVAFSNPRFPGSIAYQPEEFLTFFNGKPNSHKQHSIKKAIGIIKLNLDITGNIKSYRTIGSCESEFLEFLKSIKS

SEQ ID NO: 1162 - protein, 1118 aa, synthetic construct
  REGION 1..1118: note = MG86-50 effector
MRKILSLDLGVTSCGYAVMEDIGANSYSLLDYGVVMRDNLNDRGTQKDRREKKQSRELLDKKKKRVQQIKQLFEEYSLSYQDKKHYDIWKLRAVDAFERQLSNDELFALLRFVAKHRGYKSLKIEDLIAEIEAKEKIGDCESGEINVPTDLEKFSETLAYLDALKCQHKDKTAAQIIWELESQKENSTFRNHGNYRYMVRREDIKKEIEKLIEVQQAFGFFKNEQDAKEFASKVTEIVIPQEAVTLNPDNINKCLIYKEEICAPLFSYSFDMFQVYKLLADLKIGGVNASVEQKEQILQKLLEDMKKFKCKNIYSVKDFKKILEINDEDVKINNFQEFKTVKGKKEPNNLIKFHFISSFKKLDLAILNEIIKDEKHDEIFDAIATQIHLNVNPEKLLENIQELFQRYDFSFSKEAIRDFTLALHKNKVSGTSSYSLKGLKDLISLMKDGKNESDAKEMLGVSKSENYSQFLKGIAYLKPQNKEGQLRYEIDENKISNHVVKSLVNWALRVVVDLHAKHGTFDIIKLESTRELSQPDDVKRDIKAANDKNEKEWQGLIQKYKKHFEAKGLNLQNNKEYLLKLKLWEQQKEFGIYSYKVLSIDEVLSDKTEIEHIVPRACGGSNAEYNKALDIKDENAKKGNKLPLDYLSGEKKEVYINFVKELKESHTINFKKFKNLMAEELKDVYKEARDDVSLHATSYTEKLLGEILKRYYPFSDLVKENQRVMHISGRATSYLCRILGIDNKSRDTNFHHAEDAILLGVMSRSYLQNISTNFEKNYELTSQNAKENFKKIIPMIEGASPHQIFTHIRESYMEDIENSPFYKALDGTLKTPAFWVSKKPIGTKAHNETIQSKKNMAYYVPVNSLLDRVKPNHKMGTDEFYKKFNKEVYEKIQVVQDNPKDFTSLAFAKKRDEVVTLLNKTAFVSTKDEKAELDKELRNLMAKPLYDVNGNEIRRVKRVGEKVSIRVRKGYAGNAPSMLAMRCSVETPTRLFTDRIDFKDSILLKKNDGSCIDIFNNDLVEICTYEKKQVVLKLTGLLRTFVIDAKENKMLKVKNPKYPIREEAQPKQYNSYVAVKKMCGIKKYKTDASGKVLGFYYLGRVLDNEKELFAKVLSYKAL

SEQ ID NO: 1163 - protein, 1137 aa, synthetic construct
  REGION 1..1137: note = MG86-51 effector
MKRILAVDLGITSFGYAILEELEENRYKCIDFSVIMRDSPYNEKGKSKQSLRSSFASLRNLIKKRKKRIKNLAKLFEKYNLLTYQNAMLIQKENKIKNKWQIRANKALNEKLSNEELFAIFAHMAKHRGYKSIATEDLLYELQLELKLITNDTSESQLDDEKKQIYAALNKIEKLKEQYKTQTIAQLIDKAVKEGKLKSFRNHDNYEKMIRREDIEYEIQTIIKKQCDFKALNFNKEECSKFTNEILEIITKQDMPQNDESVFGKCSYYKNEKAAPKYSFLYDLYRLYKTLADLNITNYNLTKEDREKIVNYVKEKITNGKQLKQITYKDIRKILGLNSEQKIFNKEDTVILKGKETQRVFVKFFFISDISKFSNLIRQIIKQKNYIDIFKDIAEIIQLERTPKIAFKKTTELLNKENIKYENHEIIELIKAKKAGTLNLSHRFIKQALPYFIEGKNEKDIKEILGIANFEDYSNYPKGLKYLHLGKNNYFEQINNKINNHAIKSLASWALNNIADLSWKYGIFDEIIIESAKDVLPKKIQKAIEKFSNEQKKEIEKIIKSYKDQFPNINKNMAKKIKLLESQNFLDLYSGKTINISDLFEGKADLEHIVPKSLGGLNTDYNLVIAYKDTNMQKSNRLPLDWLNGNQQYINRVENLFKEGKINWKKRKNLLANSLDEIYTEIKDTKSLRATSYLEALVAQVLKMHYPFKNKEHRKNAIAIRTIPGKTTSKARALLNIKSKSRDTNFHHAEDALILATLNRKWHNNLHRYLKDNYGKTEKELQKIWQKNTPYIEGISISDYLKDAFEKFMSKGENSIWYKDMFGCIRSVSYWVNKKPLSASSHKDTVYSAKHKDPNNPKKILPTVRKNILKEFENLKIVSKRGSLTAQEFLELYYKNIRQKLWLYKIGNFNDLTYKAIEQRAKNIADTITKYKKSSKTDKESDKRYLEELNKWLTTPITIDNKNIYKTIFIDDTFAPLKIKRGKNNEVIVRTDDNFLAVIFEKKDNNKLNITKVDINSLEKLESKNSLIVYLNEIIYIFNNKKIIHYGALRSFSISNQGAKLIKLFNPKFPSNPKAQPAYFSKGSSFKDISIGSATGVIKVKLDISGKIKSYQKYGFISKELEEQFLKESGYGCLENS

SEQ ID NO: 1164 - protein, 1127 aa, synthetic construct
  REGION 1..1127: note = MG86-52 effector
MKKILAVDLGITSFGYSILEEANDNSYRCIDNSVVMRKSPYEEKSGESSQKQHSAQKSLRKLNKKKKKRIKCVAKIFDDFGLLPYEKALQINRDNPIKNKWELRAIDALQRPLSPEELFAIFAHMAKHRGYKSIATDDLLYELERELGLRDSETAGSTKSDERSQVYAALNRLEELKKSYGSETIAQVIHRAVAEGKFRSYRNHDDYEKMIRREDIEEEIEKILLKQAELDALPLDNEQIGELIDRLKECITDQKPPTIDESLFGYCTFYKEEIAAPRYSYLYDLYRLYKKLADLSIDNYEVTPEDREKIIRWVEEKIKAGKNVKSISYKEIRKILGLSPDQKIFGQDDERIIKGKKEPRVFVPFFFLANISKFKNLIASIQKHPDAQQIFKELAEILQRSKTPRESYEKIQELLQGKGINASEAEIVELFKNKKPGTWELSHKYILQALPLFLEGMKEADIKKQLGFSDSEDYSAYPKSLRHLHLREGNLFEKDTNPINNHAIKSLASWALGLIADLSWRYGPFDEIVVESARDALPENTRKDIDKAMAEREKSLETIVKKYKSQFPTIDKRLARKIQLWEQQKELDLYTGQTIKLTDLLDGRADIEHIVPRSLGGLSAEYNTIVALKDANAQKGNRLPGDWLSHDDAYKQRIEMLKNKSLINWKKYKNLTATSLDETYTETFHSKGLRATSYLEALVAQVLKRYYPFPDPKARRHGHTVRMIPGRVTSKTRSLLGIKSKSRDTNFHHAEDALILAIINRGWQNRLHRMLRENYGKSEAELKALWEKYLPHIEGLTVPDYVKEAFERFMSKGEESLFYRDMFGGIRSVSYWVNKKPLSASSHKDTVYSPRHDIPTLRKNILDTFASLDVLKKRHDLTADEFMKKYDTEIRQKLWLHRIGNVNDESYRTVEARAAQIAETITRYQLMDAQNDKTIDEEYQQELKTLLSTPIEVGGKQLRKMRFVYDKLNAVQIDRGLVETDKNMLGIHLSKGPKGKLTIRRVDVNNAHQLSRQKEGMLCYLNEMLFFFNKDKLIHYGCLRSYIESSKKVALFNPRFPANPKTQPKRFTTGSQIKQVSVGSTTGVIKAHLDLDGHVKSYELFGQITPKQLRWFIEESGYGGVENDPDH

SEQ ID NO: 1165 - protein, 1141 aa, synthetic construct
  REGION 1..1141: note = MG86-53 effector
MKKILSLDLGITSLGYGILNEKENNIYECIDHGVMMRDAPFDSKGNSKQSLWRDYASQRSLNIKKKRRIRQLASLFETYGLCSFDACMKVQYKNKITNKWKLRAEDALNRKLTYEELFAILAHMAKHRGYKSIATDDLLYELEVELGLIDDEMNVKDSDDEKRQVYAALKRLEKLKAEYKQETIAQVIHRAVEKGKFRSYRNHDNYEKMIRREDIEDEIETIIAKQCAFSAFDIGSDQCITFTERIKEIITDQVMPENDPSLFGNCAFYENEKAAPKYSYLYDLYKLYKTLADLKINGKPATKEDRKKIVSFLFGKVSKGKNIKELKYKEIRKVLNLSTDQKIFDKEDTMTIKGKKSDRTLVKFSFLSEIGKFPQLVTDIAEHPQYMEIFAQLAEVLRLHKTPQEAFKAIKLLCKSHTIEVVEREVLELIKSKNAGTLSVSHKFIMDVLPYFKDGYSESEAKEQLGVKTSEDYSTFSKSLKHLHLGKNNLFEKIQNKINNHAVKSLASWILRRITDLSWRYGIFDEIVIESARDTLPKSIRDAIDKSMREREKEVDKIVDQYKKEFPNIDRKMARKIKMLESQKFIDLYTGNIINISDLFEGRADIEHIVPRSLGGINADYNIVISHRDSNMQKSNRLPMDWLAENVDYINRVEKLFSDHLISWKKRKNLLARSLDETYVEVRDTKALRATSYLEALIAEVLKMHYPFPDVEHRKNGIAVRNIPGKTTSKTRSILGIKSKSRDTNFHHVEDALILATISRGWQNRLHKMLRNNYGKSEEELKKLWKAYTPHIEGITIADYVKEAYERFMSKGEESPFYHDMFGDVRSVSYWVNKKPLSASSHKDTIYSAKHKDPNDPSKTVPTIRKSILSAFASIKIVENRNRWSLDDFEKVYDKEIRQKLWLYRIGNINDPVYRAIEGRAQVFKDIINEYIYKDVGNNKEEDEIYKQKLNAFLNEPIVAANKPVYKVHFVDETFNSIVINRGKGNEVLVRTDDNFLAMIFAKGEKEKLHIEKVDVNSHKKLQNKDAMIIYLNEMIYLFNKKKIIHYGCLRSFSVKSAGGKYVKLFNPRFPSNPKAQPKKFSTGTSTRDVSVGSVTGVIKVHLDLTGKIKSYEKFGLISKELEERFLEECGYGSMEDDTYH

SEQ ID NO: 1166 - protein, 1129 aa, synthetic construct
  REGION 1..1129: note = MG86-54 effector
MKKILAVDLGITSFGYSILEEANDNSYRCIDNSVVMRDSPYDEKGESSQKQHSTQKSLRKLNEKKKKRIKCVAKIFDDFGLLPYEKALQINRDNPIKNKWELRAIDALQRPLSPEELFAIFAHMAKHRGYKSIATDDLLYELERELGLRDSETAGSTKSDERSQVYAALNRLEELKKSYGSETIAQVIHRAVAEGKFRSYRNHDDYEKMIRREDIEEEIEKILLKQAELDALPLDNEQIGELIDRLKECITDQKPPTIDESLFGYCTFYKEEIAAPRYSYLYDLYRLYKKLADLSIDNYEVTPEDREKIIRWVEEKIKAGKNVKSITYKEIRKILGLSPDQKIFGQDDERIIKGKKEPRVFVPFFFLANISKFKNLIASIQKHPDAQQIFKELAEILQRSKTPQESYEKIQELLQSKGINASEAEIVELFKNKKPGTLELSHKYILQALPLFLEGMDEKEIQRQLGFSDSEDYSAYPKSLRHLHLREGNLFEKDTNPINNHAIKSLASWALGLIADLSWRYGPFDEIVVESARDALPENTRKDIDKAMAEREKSLETIVKKYKSQFPTIDKRLARKIQLWEQQKELDLYTGQTIKLTDLLDGRADIEHIVPRSLGGLSTEYNTIVALKDANAQKGNRLPGDWLSHDDAYKQRIEMLKNKGLINWKKYKNLTATSLDETYTETFHSKGLRATSYLEALVAQVLKRYYPFPDPKAQQHGHTVRMIPGRVTSKTRSLLGIKSKSRDTNFHHAEDALILAIINRGWQNRLHRMLRENYGKSEAELKALWEKYLPHIEGLTVPDYVKEAFERFMSKGEESLFYRDMFGGIRSVSYWVNKKPLSASSHKDTVYSPRHDVPTLRKNILDAFAALDVLKKRHDLTADEFMKKYDTEIRQKLWLHRIGNVNDESYRAVEARAAQIAETITRYQLMDAQNDKTIDEEYQQELKTLLSTPIEVGGKQLRKMRFVYDKLNAVQIDRGLVETDKNMLGIHLSKGPKGKLTIRRVDVNNAHQLSRQKEGMLCYLNEMLFFFNNKKLIHYGCLRSFSINNQGAKYLALFNPRYPANPKAQPKRFTTGKKIKPVSVGSTTGVIKAHLDLDGHVKSYELFGQIIPEQLRWFIEESGYGGVENDPDH

SEQ ID NO: 1167 - protein, 1148 aa, synthetic construct
  REGION 1..1148: note = MG86-55 effector
MNGKRRKRILGVDLGVTSFGYGIVETEKGTSDYTVVDKGVVTRDRFVNDPKSGKTPQKKHSEIQSRSKILDAKKKRRYAVAEIMEKHGVLTVKECRESARKNTITNQWELRADDVWKRPLSPEELYAIFKHMADHRGYKSLSTEALILEEKRKAGVVDAKEETPKTATEEGDDAGFAMAAMELDALRKKYPGETVVVTIRKAIENGEHSSWRNHDNREKVIRREHIEEEIEKVVARQYEMGAFDFGEDAAIGFVKDMKEAIIHQDLPTIDISKFGTCPVYPEEICAPKFSYVSDMYRIRKHLADLRIDGNPLSKEERSAVTGWIEESAKKGSLPEKITYTKLRKILKLPEERLFNGMPDRIEGEKKDIPRVFVTLLYLPVLGKTPGLMRIETEHESPMDVHESIATALQLSLTPTEGVAKAAEALKKHGVSMETLELLELFAAKGKRSGTMNLSHRFMREALPLFEEGLDESGIREHLGISTKEEYGAYPKSVRHLHLGKGNHYERNFGVVNNHEVKTVASWSLGLIADLDRRYGPFDEIVVETARDALPPKRQKAIEIAQKRRDERISKTIEAHKKEIPGMDRRLAAKIILLEECGGIDIYTGRGIGLSDILDGRVEIEHVIPKSLGGSNADYNLVLAYRDTNTRKGNRLPGDIYGHDPAYKERVERIFAKNGKKKRNLLAETIDDAYIGVSDTASMRATSHIERVVTQVLKCHYPFPNPEHRENGVAVRMVPGKTTSRMRGLLGVKSKSRSTNFHHAEDALILATLDRGLFNRIHKNLRENYGKSKEELKKMWASLLPTIDGRPVREYLAEAAEKFHSKDKDPEGKNLFYRDMNGEIRTVSHFVRKKPGTGAAHGESVYSAKYFERFGQIIARKKLSEEIEKMGIAKKRHSIGADEIEKKFEELVAKTVLHLSGEPNHPVCVAIRERGKEIVELLEKYRQLGAKDDKELDEKFRKELGDLIASDIVAGGNPVRKIAIVPPGTGGAMGIRKRNGKPTGYVTKEKNAIGIFVEKSGKGIDVRRVDVTNKNEFAEKSKKGEGRIFYMNEPLFFFDKKGQIVASGALGGTTTIDKMGIAGKVMLFNPKFPRSPKFQPSHFATGKGSLKEFGIKKAVGVLKITPDLTGRIIKHEKIGIVPSDAMKIVLEGV

SEQ ID NO: 1168 - protein, 1129 aa, synthetic construct
  REGION 1..1129: note = MG86-56 effector
MKKILAVDLGITSFGYSILQETSRNSYQCLDNAVVMRSSPYDEKSGESSQKQRSSQKSLRNLNQKRKKRIKCVAKIFDHYGLIPYQKSLKINRDNPIKNKWDLRAITAWQRLLSPEELFAIFTHMAKHRGYKSIATDDLLYELEMELGLRNLETEDSKKSDERSQVYAALNRLEELKKSYGSETIAQVIHRAVAEGKFRSYRNHDDYEKMVRREDIEEEIEKIILKQAELGALPLDNKQIGGLIDDLKECITDQEMSTIDESLFGYCTFYKDEIAAPKYSYLYDLYRLYKKLADLKIDHYEVTPEDRNRIIQWIEEKIKAGKNIKSITHKEIRKILGLSPHQKIFGQEDERIIKGKKEPRVFVPFFFLANISKFKKIIASIQKHPDARQIFKELAEILQRSKTPRESYDKIEKLLQSKGIYASEAEIVELFRNKQPGTLELSHRYILQTLPLFLEGMDEKEIQRQLGFPDSEDYSGYPKSLRHLHLRDGNLFEQSVAPINNHAIKSLASWALGLIADLSWRFGPFDEIVVESARDTLPEKVRKEIDKAMREREKALEEIIKKYKDQFPTIDKRLARKIQLWERQKELDLYTGRTIKLSDLLDGSADIEHIVPRSLGGLSTEYNTIVSLKDANAKKGNRLPGDWLSNDDTYRRRIDMLKDKGLIDWKKHKNLVAASLDEIYKENMHSKGVRATSYLEALVAQVLKRYYPFPDPEARRHGHTVRMIPGRVTSKTRSFLGIKSKSRDTNFHHAEDALILAIIDRGWQNRLHRMLRENYGKSEEELKKLWERYSPHIEGLSIADYLKEAFERYMSKGEESLFYRDMFGGIRSVSYWIDKKPLSASSHKDTVYSARHSIPTLRKSIFDAFAALEVVKNRHKLTAESFMKLYGKEIRQKLWLNRIGNLNDESYRAVESRAAKIAETINRYQLMDAQNDKSMDDEYQRELKALLAAPIEVNGKQLRKMRFMINKNTIPINRGLVETDKNMLGIHLSKGPKGKLTIQRVDVNNAHKLKRQREGLFCYLNEMLFFFNEKKLIHSGCLRSFSINNQGSKYVKLFNPKFPSNPKAQPKKFSTGSSTRDVSVGSTTGVIKVHLDMDGHVKSYELFGTVTSEQLRWFIEESGYGGVENDTNH

SEQ ID NO: 1169 - protein, 1131 aa, synthetic construct
  REGION 1..1131: note = MG86-57 effector
MGKKILAVDLGITSFGYAVLEEKEENSYICLDNAVVMRDSPYNESGESTQHIRSLQRSQRRLNEKKKKRIRCVAKVFDRFGLLAYEKALLSNRENRIKKRWELRAVDAWQRKLESEELFAIFAHMAKHRGYKSIATEDLLYELEIELGLRAIDGESAAKGDERSQVYAALNRLEELKKEYGSETIAQVIHRAVAEGKFRSYRNHDDYEKMIRREDIEEEIEKIVLKQAELGAFSLPNEQIGALIDALKECITDQEMPTNDMSLFGSCTFYKDENAAPKYSYLYDIYRLYKKLADLRIDNYEVTLEDRKKIIEWVEEKIKAGKSIKQLTYKDIRKILGLSDDQKIFGQDDERLIKGKKEPRIFVPFFFLSSIAKFKKLMAAIQKHPDAHAIFKELAEIIQYAKTPQEAYKKIKELLQKSGIEASDAEIVELFKNKKPGTLSLSHRYILQALPYFLEGMEEKEVQRQLGLSDSEDYSRYPKSLKHLHLGHDNLFEDEKNIINNHAVKSLASWALGLIADLSWRYGPFDEIVLETARDALPKDTKRKIERAMKEREKALDEIIKKYQDQFPAIDRRLARKIQLWEQQKELDLYTGQTISLTDLKDGRADIEHIVPRSLGGLSAAYNIIVALKDSNVQKGNRLPGEWLAGDEGYRNRVEMLKDEGLIDWKKYKNLLATSLDEIFVEKMDSKGIRATSYLEALVAQVLKRYYPFPDPKASKHGHSVRMIPGRVTSKVRSLLDIKDKSRDTNFHHAEDALILATISRGWQNRLHRLLKENYGKSEEELQKLWQKHLPHIEGMTLADYIDEAYQRFMSKGEESLFYRDMFGGVRSVSYWVNKKPLSASSHKDTVYSPKHDVPTLRKSILEAFRALDVMKNRHKMSADEFMEKYDKEIRQKLWLHHIGNTKDAVYQAIEKRAKEIAKTFTDFALKDAKHDKSVDEAYLAELARLLNEPIVANGKSVRRVRFVYDKLNAISIDRGLVETDKNMLGIFIEKGAKKLQIYRMDVNNFREFSDKKGMVCFLNEMLFFFNSKKLIHYGCLRSFSINNQGAKLVKLFNPKFPSNPKAQPDKFSNGSSIRDVSIGSATGVIKAHLDFDGHVKSYEVFGSVSAEQLAWFRKESGYGSVEDGAHHEAL

SEQ ID NO: 1170 - protein, 1142 aa, synthetic construct
  REGION 1..1142: note = MG86-58 effector
MKRILAVDLGISSFGYAILEESGANRYRCIDNSVVMRDTPYDNDGNSKQSLRRSHSSMRSLNEKRKRRVRELARIFDSYGLLSYEECRRVRRENKIIDKWKLRAEDALSRPLSIEELYAILVHMAKHRGYKSIATDDLLYELELELGLTQEEPETLKDDEKRKVYTALKRLERLKERYEGETIAQIIHKAVLEGELRSYRNHDDYEKMIRREDIEEEIETIVKKQCEFGALPLDSGRCMEFIEALHATITSQTMPENDLELIGKCSYYPQEKAAPRYSYLYDIYRLYKTLADLNISNYEITAQDREKIIEFVTQKASKGKNIGQLLYKDIRKLLGLGDGQKIYGKDDRLKIGGKSVERTLVKFFFLKNISKFPSLMRKIISHTESLDIFGEIAETIRSHKTPRPAMDALKDILKRYEIEYDDMELIELIKGKSAGTLHISHRFIKDALPHFAEGKNEKEIKEILGVHICENYGDFPKSLKYLHLGKDNKFESENSQIPINNHAVKSLASWSLRLIADLSWRYGVFDEIIIESARDVLPKSIQDAIDKSMKKREKELDAIIGKYKNEFQSIDRKMARKIKLLESQNFMDLYSGGTIAISDLLEGRADIEHIVPRSLGGLSADYNLVIAHKDSNMQKSNRLPMDWLGGDKQYLNRVEMLFAEHKIDWKKRKNLLATSLDEIYSEVAHSKTLRATSYLESLVSEIIKMYYPFADEKSRIDGKAVRNVPGKTTSKTRSWLGIKSKSRKSNFHHAEDAMILATISRGWQQRLHTMLKENYGKSEDELKDIWKKFTPHIEGISLAEYIDEAYERFMSKGLESIWYRDMFGGIRSVSFRIDKKPLSGASHKETIYSSRHRDPENPDKILPTVRKSILDAFGALNILNNRHKWDREKFIKKYDKEIRQKLWLYRMGNLNDPVFRAIEKRAGEIGDLMESYIYKEPSHDKEIDERYQEELRELLQKPIVASGKAVYKVPFVDDSFSHIEINRGRGNRVIVRTDKNFLAVMFERGKKDRLEISKIDLNSMHRLRHSDAMIVYLNEIIYLFNKKKIMHYGALRSFSINKQGGKYIKLFNPRFPGSPKSQPGFFSTGSSIKAVSIGSATGVIKVHLDLDGRVKSYEKYGSIPKELERDFLEESGYGVMEDNTHH

SEQ ID NO: 1171 - protein, 1131 aa, synthetic construct
  REGION 1..1131: note = MG86-59 effector
MGKKILALDLGITSLGYAVLDEKVDNNYYCLDNSVIMRDAPYDIKSGESSQKKHGVYKRMRSLVEKRKKRINQVSKVFEQFGLLDFTSAKKIQTENSYKEKWKLRAEDALNRKLSHEELFAVMTHIAKHRGYKSIAMDDLLYELELELELVEPVGDEESLGDEKRQVYAALDRVERLKREFPHETIAQVIHRSVKEGKLTAYRNHDNYEKMIRREDIEHEIVTIIKKQIEYGLLDGRLDSEKFVEALKKAITEQVMPENDETLFGHCSFYPEERAAPRYSYLYDLYRLYKTLADVWIDHYELTQEDREKIVAYVENRIKHGKSIDKLTYKDVRKILALEDRCRIYGRSDEYLVKGKKTARVLMKFFFLSKIKTFAQMIRSIMDHTDAYSLFAAISEILQQEKTPKPAYNKIRSLLDAAGIEAEDKEIIALIKGYSSGTLSISHRYILDALPFFVQGKSEKEIQKILEVSLSEDYSKYPKSLKNLHLGEKNLFEEYRTSLNNHAVKSLASWVLRRVADLSWKYGVFDEIVIESARDTLPESIKKEIEKGLREKEKEIDKIVSTYKKEFPSIERKMARKIKLLESQNFTDIYTGKTINISDLFEGKADIEHILPRSLGGLSTDYNLVIAHRDSNMKKANRLPMDWLQGEKEYVNRVENLFHKHLINWKKRKNLLATSMDDVFMEIKDTKTLRATSYLEALVAENLKMFYPFPKKEHCKTGIAVRNIPGKTTSKARAILGIKSKSRDTNFHHAEDALILATLSRKWQNRLHRMLKENYGKSEDELKKIWQKYTPHIEGIEIATYVKEAFERFVSQGENSLWYKDMFGGVRSVSYWSNRKPLSASSHKETLFSGRHGIPTLRKSIYREFEGLNLVKERNKLTSESFMKEYEKEIRSKLWYSYSGNLNDPVMRAIDKKAAQIAGLIDHYVFQDAKNDKAMDERYKHELSELVLQPIVVDDKVVRKVRFVYAEYKSKVRPINRGLVENDKNMLGLFVEKGSKKLSFTRVDVNNVKELDRRFDGLKVYLNEMIYIFNDKKLIHYGCLRSFSENNQGTKYVKLFNPRFPSKPKSQPEKFAQPSGIKDVSIGSATGIIKVHLNLNGTVKSYEKFGTIPQKFEKEFLEESGYGGVEDNTHH

SEQ ID NO: 1172 - protein, 1127 aa, synthetic construct
  REGION 1..1127: note = MG86-60 effector
MYGGKKMGKKILSLDLGITSIGHSILDELDNDRYSLVDYGVSMFDKATDKDGKSKKLLHSASMSTANLYDLRKERTKNLAALFESYGLGKANDLLMQEKKNKFTQKWYLRAEKSFSEKLALEELFTVLYLMAKHRGYKSLDTDDLLEELLLDLEFEVPEKKEKDVEKGKIKQALKTVEALRKEYPEKTIARIIYEIEIKKSNPTFRNHDNYNYMIRREYIREEIEKIVLAQKDFGLFVNNMDTKAFIKELIVTIDDQKDSTNDLSLFGNCEYYPEHKIAHQYSLLSDIFKMYQSVANITLDKTKITKEQINVIAEEFFKKIKIGKNIAEIKYQDIRKILKLSDEVKIFGKEDYHLDKKGKKVHHTITKFHFLANLGKVDNSFIKSAFEKENKFEILKEIFDVLEFEKAPKSMYSKINEVFVKYALVEDERLKDETIISLIKYKSGSSLGTSAYAMIKFIPYFEKGMATDEIKQELKLERNEDYSGYRKGIKHLHVNTFEEDDNLEINNHPVKYVVSATMRLVKHLHVTYGAFDEIRVESTRELSQNEETKKAIDKANREQEAKFQKIIENEEYQKIARDYDKNLKRYARKIMLWEEQEKLDMYSGKVIGFDDIFSNRVDIDHIIPQSLGGLSVKHNLVLAHRDENVKKSNQLPMHFVADKTDYINRIEHLFKEYKINWKKKINLLAETLDDGYKDTFESKALRATSYIEALTAQILKRYYPFPDKKKQANGQAVAHVQGRATSNIRKLLGVKIKVRDTNIHHAIDAILIGLTNKSWLQKLSNTFRENMGVIDDEARAKIKKEIPLIEGIEPKELVELIEDAYNIYDEDSVFYKDIFGKTKTVNFWVSKKPMSSKIHKDTIYAKKQNGFFTVREDVIKQFIALKITTKTDSEAFMKSFEKSILHKMYSYKTNPKDAICSVVQHRASEIKSLLESFAGIDAKDKEIMSKAKEKLDALVHKELMDNNGNTIRKVKFFQSNLSGFDIRGGLATKEKIFIGFKAKFENEELIYQRIDLANMKNNLKIKGLFIGRNNLIYIVFKKEEKNLIGSLESFDEKNNTIRLFDPRFPKTLEYQPQKYKVTSGKSRKEFSIGSAMGIIKINLDILGNIKSYEKLGVITKELEQKLFHKE

SEQ ID NO: 1173 - protein, 1130 aa, synthetic construct
  REGION 1..1130: note = MG86-61 effector
MKKILAVDLGITSFGYSILQEVSHNSYHCLDNAVVMRDSPYDEKSGESSQKQRSSQKSLRNLNQKRKKRIKCVAKIFDHYGLIPYQNSLEINRDNPIKNKWDLRAITAWQRPLSPEELFAIFAHMAKHRGYKSIATDDLLYELEIELGLRNLEPEDSKKSDERSQVYAALNRLEELKKSYGSETIAQVIHRAVAEGKFHSYRNHNDYEKMVRREDIEEEIEKILLKQAELGALPLDSKQIGRLIDDLKECITDQEMPTIDESLFGYCTFYKDEIAAPKYSYLYDLYRLYKKLADLKIDHYEVTLEDREKIIHWVEEKIKAGKNIKSITHKEIRKILGLSPGQKIFGQEDERIIKGKKEPRVFVPFFFLANISKFKELIASIQKHPDAQQIFKELAEILQRSKTPQESYEKIKKLLQSKGIYTPEAEIVELFNNKKPGTLELSHRFILEALPLFLEGLKESEVKTQLGFSDSEDYSQYPKSLKHLHLGHGNLFEAEENPINNHAIKSLASWALGLIADLSWRFGPFDEIVVESARDTLPEKIRKEIDKAMREREKALDEIIAKYKKEFPSIDRRLARKIQLWERQKELDLYTGQTIKLSDLLDGRADIEHIVPRSLGGLSTEYNTIVSLKDTNAKKGNRLPGDWLSNDDAYRRRIDMLKEKGLIDWKKHKNLVAASLDEIYTENMHSKGIRATSYLEALVAQVLKRYYPFPDPEARRHGHAVRMIPGRVTSKTRSFLGIKSKSRDTNFHHAEDALILAIINRGWQNRLHRMLRENYGKSEEELKKLWEKHTPHIEGLSIADYLKEAFERYMSKGEESLFYRDMFGGIRSVSYWINKKPLSASSHKDTVYSARHSIPTLRKNILDAFTTMDVVKNRHKFTAESFMKLYDKEVRRRLWLHRIGNLNDESYRAVENRAAKIAETINRYQLMDAQNDKTIDDEYQQELKTLLAAPIEVNGRQLRKMRFVYDKLNAVQIDRGLVETDKNMLGIHLSKGAKGKLTIRRMDVNNVHELSRQKDGMLCYLNEMLFFFKPDKLIHHGCLRSFLENSQGAKLVALFNPKFPATPKSQPKFFAPGSQIKQVSVSSTTGVIKAHLYLDGHVKSYELFGTVTPEQLRWFIEESGYGGMENDTNH

SEQ ID NO: 1174 - protein, 1119 aa, synthetic construct
  REGION 1..1119: note = MG86-62 effector
MKGLCMSKLILSLDLGITSCGFSVLEELQESYRLIDYGVIMRDNPFDGNTQSDRSLHKQGRVLLDKKLSRVKKIKKIFLEFGIAYEDTNYQNLWQLRAVDVFERKLRGSEFFALLRYLAKHRGYKSLKIEDLIAEIEAKEKIGNCESDEISTPDIHNFSETLAYLDALKCKHKDKTAAQIIYELESNKPNPTFRNHDDYRYMIRREDVAKELVMMVHSQQKFGFFASKEEAEDFLTQVQEIIIKQDAVTLNPDLINNCLIYKDEKCAPIFSFTFDLFNFHKLLNDLKIDGEKITQEQKAMLADDFYNRLQTGKNFSGYTVKEIKKILGIESEFSKINNISEYKILKGKKVANTLVKFNFLSKLSKYDKEILESVFKQEESFLDSLSTAIHRNVNPAALLEEFYLLFKRYDMQFSEDEIQNFALTLYKEKTKGVSAYSFKALHELLDYMKEGKSESDAKEILGVGKSEDYSIFAKGVKYLKPIDKTGTLQYEVDENRISNHVVKSLVSWANRLIIDLHDKYGAFDVIKLESTRELSTPEDVKSKIKSANDKNQKEWEDLKKRYEKAAQAKGINLDNSSSYVLKLKLWEQQKEMGIYSLKMLSLDDILSDTTEIEHIIPRACGGSNAEYNKAVDLKNENAKKGNRIPLDYLTGEKKEQYKSFVDELKKEYKINFKKFKNLMATSLDDAYKEVRDEVSLHATSYAEKLLGEILKRYYPFKETLKQNQRVMHISGRATSYLRRILSIDNKSRDTNFHHAEDAILIALMSRSYLQKISTNFEENYEITQEKAKENFKKIVPLIDGASPNEIFAHLRKSYMEDIEDNPFYTGLDRSLRTPTFWVSKKPIGTKAHNETIQSKKNLSYRVSVESLFEKVKPNYKMSVEEFVNKYDKEVYQKLQIVQDNPKDYTAVAFRQRRDEVVKLLQEAAFITTKDEQQELNKKLLEVMRKPVFDVNGNVIRRVKRVGEVASIEVRNGLAYTAPSLVSLRCGYIEGESKLSLKRIDIRAYVKNKTAAPNEMDIFNNDLVEVYLLKKRELFKRIVGIVKGFTESKGGRINIRNPKYPLLKEKQPKLYQSEISIGSSCGIKKYKTDASGKVLGFYYLGRVQHEDEELFSKVLAYRRI

SEQ ID NO: 1175 - protein, 1129 aa, synthetic construct
  REGION 1..1129: note = MG86-63 effector
MKKILAVDLGITSFGYSILQETSRNSYQCLDNAVVMRSSPYDEKSGESSQKQRSSQKSLRNLNQKRKKRIKCVAKIFDHYGLIPYQKSLKINRDNPIKNKWDLRAITAWQRLLSPEELFAIFTHMAKHRGYKSIATDDLLYELEMELGLRNLETEDSKKSDERSQVYAALNRLEELKKSYGSETIAQVIHRAVAEGKFRSYRNHDDYEKMVRREDIEEEIEKIILKQAELGALPLDNKQIGGLIDDLKECITDQEMSTIDESLFGYCTFYKDEIAAPKYSYLYDLYRLYKKLADLKIDHYEVTPEDRNRIIQWIEEKIKAGKNIKSITHKEIRKILGLSPHQKIFGQEDERIIKGKKEPRVFVPFFFLANISKFKKIIASIQKHPDARQIFKELAEILQRSKTPRESYDKIEKLLQSKGIYASEAEIVELFRNKQPGTLELSHRYILQTLPLFLEGMDEKEIQRQLGFPDSEDYSGYPKSLRHLHLRDGNLFEQSVAPINNHAIKSLASWALGLIADLSWRFGPFDEIVVESARDTLPEKVRKEIDKAMREREKALEEIIKKYKDQFPTIDKRLARKIQLWERQKELDLYTGRTIKLSDLLDGSADIEHIVPRSLGGLSTEYNTIVSLKDANAKKGNRLPGDWLSNDDTYRRRIDMLKDKGLIDWKKHKNLVAASLDEIYKENMHSKGVRATSYLEALVAQVLKRYYPFPDPEARRHGHTVRMIPGRVTSKTRSFLGIKSKSRDTNFHHAEDALILAIIDRGWQNRLHRMLRENYGKSEDELKKLWERYSPHIEGLSIADYLKEAFERYMSKGEESLFYRDMFGGIRSVSYWIDKKPLSASSHKDTVYSARHSIPTLRKSIFDAFAALEVVKNRHKLTAESFMKLYGKEIRQKLWLNRIGNLNDESYRAVESRAAKIAETINRYQLMDAQNDKSMDDEYQRELKALLAAPIEVNGKQLRKMRFMINKNTIPINRGLVETDKNMLGIHLSKGPKGKLTIQRVDVNNAHKLKRQREGLFCYLNEMLFFFNEKKLIHSGCLRSFSINNQGSKYVKLFNPKFPSNPKAQPKKFSTGSSTRDVSVGSTTGVIKVHLDMDGHVKSYELFGTVTSEQLRWFIEESGYGGVENDTNH

SEQ ID NO: 1176 - protein, 1133 aa, synthetic construct
  REGION 1..1133: note = MG86-64 effector
MKKILSLDMGITSLGFAILEVVDDNSYKVVDNAVIMRDAPFDIKSGESTQSQRRMHKSMRALNEKRKRRVKEVARIFERFGLLSFQECMKVQKENKIIDKWELRAKDALQRPLSHEELFAILAHMAKHRGYKSIATDDLLYELELEFGLVDSIVEKVESKEDEKRQVYAALNRVEELKRVYPSETIAQVINRAVKERKLNSYRNHDNYEKMIRREDIEDEIERILIKQCELEGIALSEEECKHLIEDLHKAITEQVMPENNPELFGKCSCYTEEIAAPKYSYLFDLYRLYKILSDVRINNIALNEEQKERIVVYVQEKIAKGKNLKKLTYKDIRKILSLKPNQKIYGKEDEIVIKGKKSQRDLIKFFFISEIGKFSTLMAEVIKHPDHLNILARIAEALQLHKTPQESFRAIDALLKERQIRVAPDEIIALIKGFKPGTQNISHKFIIDALPHFMDGKSEDEVKEILGIRTSEDYGCYPKSLKHLHLGKENLFEKYVRPDINNHAVKSLVSWALRRIADLSWRYGSFDEIIIESTRDALPKSIQDDIDKAMREREKELDKIIDTYKKEFPSIDRKMARKIKIWKSQKEMDIYTGKIINISDLMEGRADIEHIVPRSLGGLSAEYNLVIAHRDANMQKGNRLPMDWLGEDKEYINLVEMLFNEHRISWKKRKNLLAKSYDEIYNEVKDSKALRATSYLEALVAQNLKMFYPFPDEEHRKNGAAVRNVPGKTTSKARQILGIKSKSRDTNWHHAEDALILATLSRGWQNRLHRTLRDNYGKSEEELQKIWQRFTPHLDGMTVSDYIKESFERFMSFGEDSLWYRDMFGSIRSVSYWVNRKPLSVSSHKDTVYSAKHAVPTLRKSLLAAFGGLNVITDRHKLTAESFMEKYDKEIRSKLWLHHIGNDNDPVMRAIDARAEAIAGVLKAYEMQDTKKDKELDETFKESLNTILSAPIEMDGKIVQKTRFVYSKLKGMDRKVRKGFVETDKNMLGIFVTKGSKKLEIVRMDVNNINDLQKEKEGIRVYLNEMIYLFNEKKVLHYGCLRSYLENAQGAKMIALFNSRFPANPKSQPKMFSTGSQIKQVSIGSTTGIVKVHLDINGSVKSYEKFGFIPKELEEEFKLECGYGGVEDDTHY

SEQ ID NO: 1177 - protein, 1130 aa, synthetic construct
  REGION 1..1130: note = MG86-65 effector
MKKILALDLGITSLGYSVLEEAGEHSYRVLDNAVIMRDAPFDKQSGESTQSQRRVQKSMRRLNEKRKRRVREVARIFDRFGLLSFEQCMQIQKENKIIDKWRLRAEDALQRPLSPEELFAIMAHMAKHRGYKSIATDDLLYELEIELGLADPLDTQEGSNADEKRQVYAALNRVEELKKLYPAETIAQVIHRAVQEGRLSAYRNHDNYEKMIRREDIEHEIETIIVKQCEMGAIELEEEKCKELIESLQEAITDQVMPENDPELFGRCSCYPEEIAAPRYSYLFDLYRLYKIVGDLKINGIALDDDQKERLIAYVEEKIAKGKSLKSLTYKEVRKILSLAPDQKIYGKEDVVIIKGKKSQRDLIKFFFISEMGKFANLVAEVVKHPERLKLFARIAEALQLHKTPQESFKAIDTLLKEHEIAVEPNEIIALIKGFKAGTQSVSHKFIIDALPHLKEGAEEYKVKEILGIQTSEDYGSYPKSLQHLHLGKNNLFEKYVRPDINNHAVKSLASWALRRIADLSWRYGPFDEIIIESARDALPKYIKDDIDKAMREREKEIDKIIDAYKSDFPSIDRKMARKIKIWKSQREMDIYTGKIINISDLIEGRADIEHIVPRSLGGLSAEYNLVIAHRDANMQKGNRLPMDWLGEDEEYIKRVEMLHDKHLIDWKKKKNLLARSYDEIYNEVRDTKSLRATSYLEALVAQNLKMFYPFPNKEHRKTGEAVRNVPGRTTSKARRILGIKSKSRDTNWHHAEDALILATLSRGWQNRLHRLLRDNYGKSEEELKEIWQKYTPHLEGMAIADYVKESFERFMSLGEESLWYRDMFGGRRSVSYWVNRKPLSASSHKETVYSGKQEVPTLRKSIAQAFDGLNVVKDRHKLTAETFMKKFDKEIRSKLWLHHIGNDNDPVMRAIDRRAREIAAILERYEPYDTNKDKERDEAFKEELNAVLTAPLEADGKLVRRTRFVYDKLNAIEIDRGLVETDKNMLGIHLLIRSGKLQISRLDVNNAYQIKQSEGMRVYLNEMIYLYNDKKLLHYGCLRSYLENAQGAKMIALFNSRYPANPKSQPERFSTGSQIKQVSVGSATGVVKVHLDIDGRIKSYEKYGMIPKEFEEAFRQECGYGGVEDDTDH

SEQ ID NO: 1178 - protein, 1128 aa, synthetic construct
  REGION 1..1128: note = MG86-66 effector
MSKILAIDLGTTSFGYAVLHDIDGSRYVCLDNTVVMRDKPYNEKGESPQGSRAVQRSLRRLIEKRKKRIRCVAKTFEFFGILEHKKALELNDPARNPIKDRWELRAVVAWERPLSPEEFFAVFAHMAKHRGYKSIATDDLLYELESELGLIEVSEQEKAVDDERRQVYQALERLERLKQEYRTETVAQTIHRAVSEGKLRSYRNHDDYEKMIRREDIEDEIEKIVLEQSKRGSLDLSENEVGEFIDALKECITDQKMPTIDESVFGHCTFYREEKAAPKYSYLYDLYRLYKKLADLKIENYDVTPEDRTKIVKWVEEKVGKGRNLKRITYGDVRKILGLGNGQKIFGVDDDRIVKGKKVPRVFVPFFFLAELSRFKQLFSAIARHPSNRVIFRELSEILQFSKTPKESFEALNAMLKRESIEADSKEIVELFKNKKSGTLTLSHRYILEALPLFLEGMDEKEIQRHLGFSESEDYSQFPKSLKYLHLGEGNLFEAEGNVINNHAVKSLASWALGLIADLSWRYGPFDTIVVESAREVLPEKVRKEIEKAMKEREKRVDVIIEQYRSEFPTIDRRLARKIELWQQQKEMDVYSGEVIGLTQLLDGSADIEHIVPRSLGGLSSGYNTIVALKHTNADKGNRLPGDWLAGDEAYRNRVEMLFAKGLIDWKKRKNLLAENLDEIYTETFDSKGLRATSYLEALVAQILKRFYPFPDEAHRKNGAAVRLIPGRVTSRIRSLLKIKSKSRDTNFHHAEDALILATISRGWQNRLHRMLRDNYGKSEEELAQVWEKYTPHIEGVSIADYIAESFERFMSKGEESLFYRDMLGGLRTVSYWVDRKPLSASSHKETVFSSRHNVVTLRKNILGVFLALDVVKNRHKLDGDTFMELYNKEIRRKLWLYRERNFNDESYRAVERRAAQIAETIDRYRQRNVRADKEADIEYQEALRILLQTPLSAAGKTIRRMRFVYEKLNPHRIDRGLVETDKNMLGIVIRRRENGKLSIVKIDVNNAGKMLTVSEGMIVYLNEMLYLFGERGLLHYGCLRSYVDNRRNIALFNPRFPANPKAQPKKFSTGSQIKQVGVGSAVGVIKPRIDLDGSVKSFQVFGEVTTEQVTWFKKETGYGGVENDTHL

SEQ ID NO: 1179 - protein, 1142 aa, synthetic construct
  REGION 1..1142: note = MG86-67 effector
MGKKILAVDLGITSFGYSVLEESKDNSYICIDNSVIMRDAPYDKDGKSKQTNRKEQTSQRSLGEKRKRRIKEVAKTFDAFGILSYDECMQVQQENKIIDKWKLRAEDALHRVLTSQELFSLLAHMAKHRGYKSIATDDLLYELELELGLRKEEFEEESKADEKRQVYAALSRLKRLKDTYKIETIAQVIHRAVEEGEFRSYRNHDDYEKMIRREDIEHEIETIVKKQYELNGLEFDEQTCLSFIEELHEAITDQIMPENDESLFGQCSYYPEETAAPKYSYLYDMYRLYKILADLKIDNYEITQEDREKIIDFVTQKVSTGKNLKQVYYKDIRKVLGLSENQKIFGKDDQSIVKGKPTQRTLIKFFFLSEISKFSVLIKKVLSHSKALEIFVQIAEKIRLHKTPKPAFEALNELFDEYDIEVVNAEILALIKGKSAGTLAISHKVIMDALAHFKEGKSESEIKEILGVNTSEDYSTYPKSFKHLHLGKNNLFEKSQNHINNHAVKSLASWALQNIADLSWRHGAFDEIIIESARDVLPKSIQDAIDKSMREKEKEIDKIINTYKKEFPSVDRKMARKIKLLESQKFLDLYSGEVINMNDLFEGRADIEHIVPRSLGGLSTDYNLIIAHRNTNMQKSNRLPMDWLQGDTTYVNRVEMLFGEHKINWKKRKNLLATSLDEIYVEVQDTKSLRATSYLESLVGEVLKMFYPFPNKEHQKNGISVRSVPGKTTSKTRSWLGIKSKSRDTNFHHAEDALILATLNRGWQNRLHRMLKENYGKSAEELKKLWQKYTPHIEGITIADYVKEAYERFLSKGEGSIWYRDMFDGIRSISYWINKKPLSASSHKDTVYSAKHKDPQNNEKILPTVRKSILGAFSGLDILKNRHKWNKEAFMKVYEKDIEQKLWLYRLGNTNDPVLRAIQERANAIGSLIENYIFKDPQHDKAVDELYQKEIRNLLHDAIIAGGKPVYKVSFVDDTFSPIEIERGKGNKVLVRTDDNFLAVMFEKGEKEKLIISKIDMNSLHQLKKQNAMIVYPNEVIYLFNKKKIIHYGALRSFLIKSSGARQIALFNPRFPSNPKSQPRNFSDGKSIKSVSIGSTTGIIKVQLDMNGKMKSYQKFGLIPKELEEAFLKESGYGGMEDNTDN

SEQ ID NO: 1180 - protein, 1132 aa, synthetic construct
  REGION 1..1132: note = MG86-68 effector
MGKKILALDLGITSLGFKAVQEAGENSYRVIDHGVIMRDAPFDVKSGESSQKQRSTQKGQRDLNEKRKRRIKKVAHIFESFDISDFETCMQVQKENRFVDKWRMRAEDALSRKLSAEELFAIMAHMAAHRGYKSIATDDLLYELELELGLIEKSTEEKEAKDEKRQVYAALNRVEQLKKKYPSETIAQVIQRAVEEGLLSSFRNHDNYEKMIRREDIEDEIATIIQTQYEFGLFDDEEKKDHFIEALHEAITDQTMPENDPALFGKCSFYTDEIAAPKYSYLYDMYRLYKTLGDLSIDNYQVTQEDREAIVAYVEEKIKSAKNIDKITYKEVRKILSLPNESKIFSREDEQVIKGKKSQRAFVKFFFLPKIKNFPHTMKSVVAHPDSLKLFAQLAEIIQQEKTPKPSFERISSLLKSHGIEVHDKEILALIKGYTPGTLSMSHRYIQDALPHFSEGKNEVEIKELLGINTSEDYSHFPKSLKHLHLGKDNLFEKQPQNSINNHAVKSLASWTLKRIADLSWKHGLFDEIIIESARDALPETIKKEIEKGMREKEKELDKIVEAYKKEFPSVNRKMARKIRLLESQKFMDLYTGDVINISNLFEGRADIEHIVPRSLGGLSADYNLIIAHRDANMQKSNRLPMDWLGGNSEYVNRVEGLFAEHLINWKKRKNLLATSMDEIFNEVKDSKALRATSYLEALVAENLKMFYPFKEEKARKFGHEVRNVPGKTTSKARQILGIKSKSRDTNWHHAEDAMILATLSRGWQNRLHRMLKENYGKSETELQEIWQKFTPHLECMSIAEYVKEAYERFMSLGEESLWYKDMFGARRSISYWVNRKPLSASSHKDTIYSGRHEVPTLRKSIIAAFDALNLITNRNKLNSESFMKLYEKEIRSKLWYVHNANTNDPVMRAIDERAKQIAKLIDSYILKDPQHNKEIDEQYKTELSDLVNKSIDVDGKVVRKVRFVYEKLNAVQINRGLVETDKNMLGIFIQKGEKKLMISRMDVNNAHELEQNKNGLRVYLNEIIYLYNDKKLLHYGCLRSFVEGNGKIALFNPRFPANPSSQPKFFSTKNEKTTGQIKQIGVGSATGIIKVQLDLNGQMKSYQKFGTIPKELEMQFLKESGYGSMEDDTHH

SEQ ID NO: 1181 - protein, 1135 aa, synthetic construct
  REGION 1..1135: note = MG86-69 effector
MNIYSGGRIMGRKILSLDLGITSLGFNVAKEVGENSYKVIDNGVLMRDAPFDVKSGESSQKQRSIHKGQRDLNEKRKRRIKEVARIFDKFGILNFEACMRVQKENRFIDKWRMRAEDALNHKLSEEELFAIMAHMAAHRGYKSIATDDLLYELELKLGLIEETITEEEAKDEKRQVYAALNRVEQLKKRYPSETIAQVIHRAVGEGALSSYRNHGNYEKMIRREDIEDEIAAIIQTQFEFGLFENEEKRDKLIDAFHEAITDQTMPENDPNLFGRCSFYPDEIAAPKYSYLYDMYRLYKTLGDLSIDNYQVTQEDREVIVAYVEEKIKSGKNIKEISYKEVRKILSLANECKIFGREDEQIIKGKKSQRAFVKFFFLPKIKDFPQTMKSIILHPDSLKLFARLAEIIQQEKTPKPSFERIKSLLTSHGIEVHTKEVLALIKGYTSGTLSMSHRYIQNALPHFAEGKIEVEIKELLGINTSEDYSRFPKSLKHLHLGKDNVFEQHQNSINNHAVKSLASWTLKRIADLSWQYGVFDEIIIESARDALPDTIKKEIEKGMREKEKELDKIVEAYKKEFPSVDKKMARKIRLLQSQKFMDLYTGKSINISDLFEGRADIEHIVPRSLGGLSADYNLIIAHRDANMQKSNRLPMDWLSGESEYVNRVEGLFAEHLINWKKRKNLLATSMDEIFNEVKDSKALRATSYLEALVAENLKMFYPFKEKKARKFGHEVRNVPGKTTSKSRQILGIKSKSRDTNWHHAEDALILATLSRGWQNRLHRMLKENYGKSEAELQEIWQKFTPHLEGMSIAEYIKEAYERFMSLGEESLWYKDMFGGRRSISYWVNHKPLSASSHKDTIYSGHHEVPTLRKNIIAAFEALNFISNRNKLNSDSFTKLYEKEIRSKLWYVHNGNTNDPVMRAIDERATQIAELIDSYILQDPQHDKEIDEQYKRELGDFVGKPIEVDGKIVRKVRFVYEKLNAVQIDRGLVETDKNMLGIFIEKGEKKLKISRMDVNNAYELEQNKNGMRVYLNEMVYFYNEKKSLHYGCLRSYVEGRSNIALFNPRFPANPKVQPSIFSTGSQIKQVSIGSATGIIKAQLNFNGQIKSYQKFGYIPKEFEEVFKKECGYGSMEDDTDH

SEQ ID NO: 1182 - protein, 1142 aa, synthetic construct
  REGION 1..1142: note = MG86-70 effector
MGRKILSLDLGITSLGCTVLEEERENSYRVLENTVIMRDAPFDNSGDSSQKQRSTYKSQRSLNEKSKKRVNALARLFDEFDLLSFDNCKQIQKENKYIDKWCMRAEDALNRKLSSEELFAIMAHMAKHRGYKSIATDDLLYELELELGLIEAIDEEDAQKDEKRQVYAALNRVEHLKKEYPSETIAQVIHRSVNEGKLSAYRNHDNYEKMIRREDIEDEIETIIETQQEFGLFDDDSKAEKFIEQLHEVITDQVMPENDPDLFGKCSFYRDEIAAPKYSYLYDMYRLYKTLGDLSIDNYEVTQDDREAVVSYVQEKIKSGKNIDKITYKEIHKILSLKDEHKIFGKEDVQNIKGKKSQRVFVKFFFLSKTKEFAQTMQAVTSHPESLHIFAELAEIIQQEKTPKPSFERIKTLLEDHNIEATPKEILSLIKGYTAGTLSMSHRYIIDALPHFAEGKREDKVKELLGISTSEDYSGFPKSLKHLHLGKENLFEQYKKPPINNHAIKSLASWALRRIADLSWCYGIFDEIIIESARDALPESIKKEIEKGMKAKEKEIDKIIESYKKEFPSIDRKMARKIRLLESQKFMDLYTGDIINISDLFEERADIEHIVPRSLGGLSADYNLIIAHRDSNMRKSNRLPMDWLGGNSEYMNRVESLFTEYLINWKKRKNLLATSMDEVFNEVKDSKALRATSYLEALVAENLKMFYPFKEEKARRFGHEVRNVPGKTTSKARQILGIKSKSRDTNWHHAEDALILAILSRGWQNRLHRMLKDNYGKSDAELQEVWQKFTPHLEGMSATEYIKESYERFMSLGEESLWYRDMFGGCRSVSYWVNRKPLSASSHKDTIYSSKHRDPNDPDKVMPTVRKSILGVFGGLDILKKRHKWNKEEFLKVYDKEIRQKLWLYRLGNINDPVYRAIDERANAIGDLIETYIYKDPQHDKAVDEVYQDEIRLLLQTPITAAEKPVYKTAFVDDTFSPIEIQRGKGNKVLVRTDDNFLAVMFEKGEKEKLHISKVDVNSLHRLKQENAMIVYLNEVIYLFNKKKIIHYGALRSFSINNQGGKYLKLFNPRYPSNPKAQPKMFTTGSSIKDVSIGSTTGVIKVQLDINGKMKSYQKFGLIPKDLEEEFLKESGYGIVEDNTDH

SEQ ID NO: 1183 - protein, 1128 aa, synthetic construct
  REGION 1..1128: note = MG86-71 effector
MEKNMTKILSLDLGITSCGYAVMQEVEDNSYLLLDYGVVMRDNPNEGGTQKERREKKQSRELLDKKKNRVKQIQQLFELHGLAYQDTKHYDIWKLRSIDAFERKLNKDELFALFRFMAKHRGYKSLKIEDLIAEIDAKEKIGDCESTEINMPTDLEKFSETLAYLDALKCKHKDKTAAQIIWKLESQKENPTFRNHGNYRYMIRREDIKKEIEKIIEAQQALHFFHNEQHAKEFADKAIEIIVPQEAVTLNPDNINRCLIYKNTICAPLFSYSFDMFQVYKLVADLKIGGMNASIEQKELLLQHLLDDIKNFKCKNIYSVKDFKKILEIDDDSVKINNFQEFKTVKGKKESNNLIKFNFLPSLKKLHSDKKLDANMLDFLFAHEQSIEIFDAIATEIHLNVNPEKLLKNIQELFTRYEFEFSEDAVRDFTLALHKNKVSGTSSYSFKALKDLTLLMQEGKNESDAKEILGVSKSEDYSRFSRGIAYLKPQNKEGQLRYEMDENRISNHVVKSLINWALRVVIDLHAKHGTFDVVKLESTRELSQPDDVKRDIKAANDKNEKEWLGLIEKYQKHFEAKGLNLQNNKEYLLKLKLWEQQKGFGIYSHKVLSIDEVLSDKTEIEHVVPRACGGSNAEYNKALDIKDENAQKGNKLPLDYLNGEKREVYINFVKELKESHAINFKKFKNFMAEELKDAFKEARDDVSLHATSYTETLLGEILKRYYPFSDALKENQRVMHISGRATSYLRRILGIDNKSRDTNFHHAEDAILLGVMSRSYLQNISTNFEKNYELTLQNAKENFKKIVPTIEGASPHQIFAHIRESYMEDIENTPFYKALDGTLKTPAFWVSKKPIGTKAHNETIQSKKNMAYYVPVSSLLDKVKPSHKMGADEFYKKFNQEVYEKIQVVQDNPKDFTSQAFARKRDEVVALLNKSAFVSTKDEKTELDKELRDLMAKPLYDVNGNEIRRVRRVGEKVSIPVRKGYAGNAPSMLAMRCSVETQTRLFTDRIDFKDSILLKKNDGSYIDIFNNDLVKIFTYEKKQVVLKLTGLLRTFVINAKEDKMLKVKNPKYPIREEAQPKQYNSYVAVKKMCGIKKYKTDASGKILGFYYLGTILDDEKELFAKVLSYKAL

SEQ ID NO: 1184 - protein, 1111 aa, synthetic construct
  REGION 1..1111: note = MG86-72 effector
MNRILSLDLGVTSCGFSVLDEVETNQYSLIDYGVVMRDNPNEGGTQSDWKAYIQQRKLKDKKKQRVKDLKDIFKSFNLNFVEKNYSNLWELRAKDSFERKLQIDELFAIFRYLAKHRGYKSLKMEDLIAEIESQEKIGNCESDDVIEPNSEEFTETLAYLDALKCKFKEKTVAQIIYDIESQKENPNFRNHNNYKYMIRREDTKDEIEKIVEAQKLFGFFKDEKEAENFKNSIIDEIIPQDPVLLNPNLINNCLIYKEEKSAPIYSYSFDIFNFYKHINDLKIGNKNATNEQKEILTNDFELKLKELKNISSYTIKGIKELLDIKDDIKISGLRETKIVKGKSVDNYLVKFNFLAHWAKFDKEIVVALKDKINYFDKIATIFHININPNALIEGFSKYFKENNLFFEEEKIKNFALSLYKNKVKGTSAYSFKALNDLIVHMKDGKNESDAKEILGISKSEDYSSFEKSIKYLKPIDKNGTLRYEIDENSISNHVVKSLISWACRIIIDLHEKYGSFDMIKLESTRELSQPDEKKREIKSANDRIQKEWEDLKDRYKSHFEALGLNMGNNKEYLLKIKLWEQQGEIGIYSGQSLGIADILSDKTEIEHIVPRECGGANAEYNKAIDTKNENAIKARRLPLDYLVEEKREVFLQNIDELKNSKKINFKKWLNLKAQTLDETFKEVKDDVSMHATSYTEKLLGEILKRYYPFTDKQKENQKVMHISGRATSYLRKILSIENKSRGTNFHHAEDAILIACMSKSYLQNISTNFEKNYELTRENAKDNFKKIVPFINGANPNEIFSYLQKSYTQDIEENPFYTNVIDNTLRIPAFWVSKKPIGTKAHNETIQSKKNLAYRVNIDSLLERVKPNHKMSAENFFEQYNKEILEKVQVFKDNPKDFTAQAFIKKRDNIIQLLQEANFITSKDEKADIDKKLRDEMKKPIEDVNGNTIRRVKRVGEDATIEVRNGLAYTAPSLVCLRCSFDEPKLQLQRIDIRSHVQNRNKNDTQIDIFNNDLIEIYVIKSKKIEYKAIGVLKGFTESKGGRANLRNPKYPLLKDKQPKLFQGEFSIGSTCGIKKYKTDASGRVLGFYYLGRVLEGDKELFSKVVTYRKM

SEQ ID NO: 1185 - protein, 1131 aa, synthetic construct
  REGION 1..1131: note = MG86-73 effector
MSKKILALDLGITSLGYSILEELGEHSYSCLDSSVIMRDAPYDKDGNSNQTVYRGQKSQRALIHKRQTRIKNTAKVFEKFGILDFASCMLVQHDNNITDKWRLRAKDALQRSLSPQELFAIMSHMAKHRGYKSIATEDLLYELEMELGLIEEHVNDDEAQKDEKRQVYAALNKVENLKKQYHSETISEVIHRAVQEGKLHSYRNHDDYEKMIRREDIEDEIETIIQKQCEFGALKLTSSRCSEFIEALHEVITDQVMPENDTSLFGKCAYYPTEIAAPKYSYLYDLFRLYKTVSDLKITNFEIETEDREKIIGYLHQKIKNGKNINQITYKEVRKILSLNDNQKIYGKDDDIVIKGKSSARSLIKFFFLSDIAKFPTVVQKISQHEASIDLFGKVSELAREHKTPRPAIDAIEELLSLHGIETDKSELLELIRNKKPGTLSVSHRFIIDALPHLQEGKSETDIKEILGVKISEDYSSYPKSLKNLHLGKDNPFEMYQNKINNHAIKSLGSWILQRIADLSWRYGAFDEIIVESARDALPKSIQEAIDKGMREREKEIDKIIEAYKNEFPTIDRKMAKKIKLLESQKFMDIYSGDMINISDLFEGRADIEHIVPKSLGGLSADYNLVIAHRNSNMKKSNLLPMDWLNEDSGYVNRVESLFKEHLISWKKRKNLLAKSLDETYVEVSDTKALRATSYLEALVTENLKMFYPFQTQAHRANGVAVRNIPGKTTSKARSLLGIKSKSRDTNFHHVEDALILATLNRGWQNRLHRMLKDNYGKSEKELKTLWEKFTPHIEGVAIGDYVKEAFERFMSMDEESLWYRDMFGGRRSISYWINKKPLSASSHKDTVYSAKHAVPTLRKSITGAFDGLGIVKDRHKLDGEYFKEIYEKEIRKKLWLYHIGNLNDPVLRAIDNRADEIVQVLHRYENGDIKKDKELDETFVNELNNILRNPIDVDGKIVRKTRFVYTKLNAVEIDRGLVETDKNMLGVFISKAENNRVKIERMDVNNAPKLLKRNSGLKVYLNEMIYLFNEKKVIHYGCLRSYVEKTGNSKLVALFNPRFPASPKSQPKMFSTGSQIKQVSVGSATGVIKVHLDLSGQIKSYEKFGMISKELENEFLQECGYGSMEKHPDH

SEQ ID NO: 1186 - protein, 1078 aa, synthetic construct
  REGION 1..1078: note = MG86-74 effector
MRDNPSDGGTQKDRSGYLQSRSLKEKKKNRVNKIKTLFILAGLNYKDKINYDIWYLRAVKSFNEKLSNDELFALFRYFAKHRGYKSLKIEDLIAEIESQEKIGDCEGGEIIPPKDLEKFSDTLAYLDALKCKHKEKTVAQILWEIESASPTPTFRNHDNYRYMIRRDDIGKEIETIVRTQHTYGFFDPGFDIETFIDSLKKIILYQAPVRLNEALIGNCTIYKNEKCAPIYSLAYDRFNAYKLINDLKIGNNSATSEQKERLIAYIDNKIAEAKNLVGLSVKELKAILDINDEALKLNNHGEYRTIKGKKEPNHLIKFSFVSKLSKFDSDLLKTLLSHQERDQIFDQIATIIQRNINPENMLNAFKELFQTIRLNTDEDTIRTFALSLFKEKKSGSGNYSFKALGDLTRLLLEGKNETDAKTVLGVSSSENYESFAKGIKYLHVNQYENDEAVISNHIVKSIASWAIRIIKDLHDKHGPFDQINIESTRELSQPEEIKRQIKSSNDANEKEWQELIRKYTPHAIQKGINLSQSPSYVLKLKLWEQQKFFGIYSHQPLGIDDILSEKTEIEHIVPRACGGSNAEYNKAVDLKNENMQKGNRLPLDYLHDERRSIFIGFVAELKETGLINWKKMKNLLAESLDETYKEAKDTISLHATSYAEKLLGEIIKRYYPFMDESKRRNGIGVMHISGRATSYLRRILSIENKSRDTNFHHAEDAIILGLMSRSYLQNISTNFTENYAKTVQEAKENFKKIIPLIDGAHPNEIFAHLRKSYEQEIETNPFYKGLDGSLRIPSYWVSKKPIGTKAHNETIQSAKNFAYYVPVASLLGRIKPNHKMHPDDFKKSYDTEVLEKLQVFQTNPKDHTAKAFVARRDETIAILNKANFITSKDEQSEIDKALRSAYNAPILDVNGNPMRRVKRVGEEASISVRGGVAYTAPSLLSMRCEYADTTKLVLKRIDIRAFASSDQIKAHQIDIYNNDLIEIFIIKSKSIESKVIGILKGFTESKGGRANIRNPKFPALKEKQPKIYQNEISIGSICGIKKYKTDATGKVLGFYYLGRVKEESAELFSPVVAYRKLL

SEQ ID NO: 1187 - protein, 1117 aa, synthetic construct
  REGION 1..1117: note = MG86-75 effector
MSKKILSLDLGITSIGYSILNELENNKYTLIDYGVSMFDKATDKDGNSKKLLHSESESSKKLHKLRKDRKRNLAELFQKYNLGNKNELLNQEKENINSNKWELRAKKAFEEKLTISELFSILYLISKHRGYKSLESTDLLEELCIKLNIDLDETKKDKKNDEKGKIKLALNTIENLKEKSDKTVAQLIYEIEIKKHNPTFRNHDNYNYMIRREYINEEIEKIISSQKSFSFFMDEFNIDSFITDIIKTIDDQKESTNDLSLFANCEYYPNEKVAHQYSFLSDIFKMYQSVSNITFNIKPQIKINKEQIKLISNDFFKKIEKGKNINDIKYKDIRNILELPENIKIFNKEDYYLSNGKKQENTIIKFHFLSNLSKIGNKFILDILKKENMYEIFKEIFDVLEFEKSPKLIYEKLKEYIDDDKTIINLIKYKSGNSLNISAKAMIDFIPFFENGLNMDEIKKELNLNRHEDYSDYKKGIKYLHISQFEKDDSLKINNHPVKYAVSAIIRIIKHLHITYGGFDEIKVESTRELSQNEQTRKDIEKANRALEKEINTILENKEYQRISENYGKDLQKYARKILLWESQERFDIYTGKSIGFEDIFTNTVDLDHIVPQSLGGLSVNHNFVLTHRDTNLRKSNQLPLNYIKDKQSYINRVEYLFSVHKINWKKKLNLLAESLDDIYKDTFESKNLRATSYIEALTAQILKRYYPFENKIKQKDGSSVRHIQGRATSNIRKVLKVKTKVRNTNIHHAIDAILIGITDHSWLQKLSNTFRENMGIIDDIARENIKKQIPLIDGIYPKELIEIIEDKYNEYGENSIFYKDIFNKTKAVNFWVSKKPMVSKIHKDTIYSKKENNIFTNRVNIINEFINLKTTINTNSKKFEESFEKNILKKMYLYKTNPSDVICKVVQKRADDIKELLNSFIYLDLKDKELVSESKIKLDELIHKELIDNNGNIIRKVKFFQSNLTGFDVRGGLATKEKTFIGFEVDITDVNLVYKRIDASNIHKVKKENHNSFKVYKNDLVFFIYPDRSFKGGKIVSFLEDKKVGAFSNPRFPANIGFQPHSFLTIFNGKANSHKQVSLNKAIGIIKLNLDILGNIKSYSKIGIIESEFLDFLKNK

SEQ ID NO: 1188 - protein, 1140 aa, synthetic construct
  REGION 1..1140: note = MG86-76 effector
MSKKILSLDLGITSIGYSILEEFKNDRYSLVDYGVSMFDKATDKDGNSKKLLHSASASTTKLYHLRKERKKALSQLFEEFGFGKKKYFLYQEKQNKYKNKWELRAKKAFEEKLKIEELFTILYTLAKHRGYKSLDSDDLLEELCSKLNIIMDEKKAKKADDEKGQIKKALLTIEELRKDSDKTVAQIIYELEMQKENPTFRNHDNYKYMIRREYIDEEIENIILSQVTFGLFSDTFDSDEFIEKLKKIITFQNPSTNDMSLFAPCEYFDEFKSAHQYSIISDIFKMYQSVSNINFNKEKTPITKEQIKLISDDFFMKIKKGKNIPDIKYKDIRKTLKLSDDIKIFNKDDEKLTITKFHFLCSLGKIDNTFIVEALEKKNGYEILKGIFEVLQLSKDPKDIYEQLKEKIDDQTIINLIKNKTGNSLNISAEAMIQFIPYFEDGFTMDKIKGKLNLNRNENYSEFKKGIKYLNIKQFEYDDKLEINNHPVKYVVSATLRVIKHLHTTHGIFDEIRVESTRELSLPTKEQVSKAKKSGKPLSKKQKTRESIDNVNKKNEAKYLAVLNNTVYIDTSNKYNKNIQKYKERLVIYEEQKRRDIYTWKGIELEDIFKDKLEIDHIVPQSLGGLSVKHNKVLCFKSSNAEKSNRLPMNYIKDTESFIKNVKYLYSKGCINGKKLKNLLATNLDETFKDTFQSKSLRATSYIEALTAQILKRYYPFKNEKKQKDGSSVRHIQGRATSNIRKVLKVKTKVRDTNIHHAIDAILVGVTNQSWLQKLSNTFRENMGVIDDKARENIKKDMPLFEMIIDDEVQYLEPKELIEMIEDRYNEFGEDSIFYKDVWGKTKAVNFWVSKKPMVSKIHKDTIYSKKQDGIYTVRENIINQFINLKTTISTTSVKFEESFKKNILNKMYLFKTNPNDVICKVVMKRAEDIKVLLDSFVDIDTKDKELVSQSKQKLDELIHKDIKDNNRNVVRKVKFYQTNLTGFNIRGGLATKEKTFIGFKASLEDEKLHYTRIDVSNFDKIRKENDNSFQVFKNDLVFFIYPDGSFRGGKIVSFLEDKKIASFSNPKFPSASEFQPISFCKIGKDSNNNPKKSGAKQQGINASIGIIKLNLDITGNIKSYQKIGRCESELLEFTKDIKV

SEQ ID NO: 1189 - protein, 1113 aa, synthetic construct
  REGION 1..1113: note = MG86-77 effector
MKILSLDLGVTSCGYSVLHQIAPNSYSLIDYGVVMRDNPYDGGTQKDRREHHQSRSLIEKKKDRIKAVQKLFDNSGLSYHDKKFYDIWKLRAIDVFERRLENDELFALFRFLAKHRGYKSLKIEDLIAEIEAKEKIGDCDSGEIKIPEDTQKFTETLAYLDAMICKYPDKTAAQVIWELENDRKNPTFRNHGDYRYMIRREYVAKEIDKIVRAQHEFGFFDNKNELIVFIEKLQEIIIEQDAVTLNPDNINNCLIYKDEKCAPVFSYSFDLFQLYKLVNDLKIDGVKITQDKREELLDTMLKSFRTFTCKASYSVKDFKKILGIDDANAKLNNYSESKKVKGKDTPNALLKFNFVHLLKKMDAEIIEVIFNNPLYVTILNEIATHIHMNVNPEMLIKEVGDTFQKHHLDFDDEQIKTFVLQLHKNKSSGTASFSLKALNDLIALMKEEKNESDAKEMLGVSKSEDYSHLLKGIKYLKPQNKQGQLQYEIDENRISNHVVKSLVSWALRVITDLHVKYGPFDSIKVESTRELSQPDDVKREIKKANDSNEKEWNNIKEKYKLHLQNLENSKTYLLKLKLWEQQKELGIYSHKSLGVDDVLSDKTEIEHIVPRACGGSNAEYNKAIDFKDENARKGNKLPLDYLSGDKREVYIQFVKELKETRAINFKKFKNLMAEELKDAFKEAKDDVSLHATSYTEKLLGEILKRYYPFTDTLKENQRVMHISGRATSYLRRILSIDSKSRDTNFHHAEDAIILGVMSKSYLQNISTNFEENYEMTEQNAKENFKKIVPLIDGAVPNEIFAHLRKSYLEDIETNPFYKDLNGNLKVPAFWVSKKPIGTKAHNETIQSKKNLAYYVPISSLLEKVKPNHKMSSDDFYKLFNKEVYEKVQVVWDNPNDYTAKAFAQKRDTVVNILNSSAFVSTKDEKAELDKKLRDIMSQPLHDVNGNEIRRVKRVGEKVSIPIRHGYAGNAPSMLAMRCKAETENRLFTERIDFKDKILLKKNDGTFIDIYNNDLVDIYTFEKKQVILKLTGLLRTFVINAKEDKMLKVKNPKFPIREDAQPKQYNSYVAVKKMCGIKKYKTDATGKVLGFYYLGRVLDDEKELFTKVLSYKAL

SEQ ID NO: 1190 - protein, 1109 aa, synthetic construct
  REGION 1..1109: note = MG86-78 effector
MKKILSLDLGITSIGYSVLDELENDRYSLIDYGVSMLDSPFIDDRKRISKKLLHAQSKSSKKLFNLRKIRKQKLALLFEKYDLEKSEQLLEQEKANTYINKWQLRCEKAFNEKLKVGELFTIFYALAKHRGYKSLDSDDLLEELIRELNLEVKNNSKKKDDDEKGKIKKALRTVEALKEKYPNKTIAQIIYEEERKGANPTFRNHDNYNYMIRREYINEEIKRIVLSQKSFGFFKDNFSVDDFILELVKTIDDQKESTNNLSLFGKCEYFKEEKVAHQYSLLSDIYKMYESVSNITFNKEKNKITPQQIKLIADDFFEKIKKGKSFSEIKYKDIKIILKLDENTKIFNKDDGRIVKFHFLSNLSKIDNSFIKKAFEKEDKYQILQEVFDVLEFEKAPKKIYEQLKGLVDNKTIIDLIKYKNGNSLNISAYAMIKFIPYFEQGLTLSDIKKKLNIKESEDYSKFKKGIKYLYVSQFEKDNDNLEINNHSVKYVVSATLRLVKHLHSTYGAFDEIRVESTRELSQNEETRRNIEKANRALEKQIDEVLLNKEYQEIANQYGKNLRKYARKILMYEKQERRDIYTGEGIEFKKIFTNEVDIDHIVPQSLGGLSVKNNFVLAHRDSNVRKSNQLPSNFVSDKQAFINRVEYLYKENKINWKKRKNLLANNLDEIFKDTFESKSLRATSYIEALTAQLLKRYYPFVNEKKQVDGSAVRHIQGRATSNIRKVLNVKTKVRDTNIHHAIDAILIGLTNESWLQKLSNTFRENVGVIDDEARAKIKKEIPLIESIEPKELVSRIEKNYNSFGEDSIFYKDIFGKTKTVNFWISKKSTSSKVHKDTIYSKKEDGIFTMRESILNKFVSLKVTPKTTSVKFMEEFNKNILQKMYLFKTNPKDVICLVVQNRAEDIKNMLDSFEGIDAKNKELMSEAKQKLEGLIHGNLVDNNGNIIRKVKFYQTNLTGFDVRGGLATMEKTFIGFRAIFENGKLSYKRIDVINFKQMNNKNDGSFKVYKNDSVFFVYLDKTMKGGKIVSFLENKKIAAFSNPKFPSAYKFQPNSFCKDKSHTGAKQHSVGSAIGIIKLNLDILGNIKSYQVLGNAKSEFLETIKGIVNG

SEQ ID NO: 1191 - protein, 1119 aa, synthetic construct
  REGION 1..1119: note = MG86-79 effector
MKKILSLDLGITSIGYSVLDELENDRYSLIDYGVSMLDSPFIDDRKRISKKLLHAQSKSSKKLFNLRKIRKQKLALLFEKYDLGKSEQLLEHEKDNIYINKWQLRCEKAFNEKLKVGELFTIFYALAKHRGFKSLDSDDLLEELTRELNLEVKNNSKKKDDDEKGKIKKALRTVEALKEKYPNKTIAQIIYEEERKGTNPTFRNHDNYNYMIRREYINEEIKRIVLSQKSFGFFKDNFSVDDFILELVKTIDDQKESTNDLSLFGKCEYFQEEIVAHQYSLLSDIYKMYESVSNITFNKEKNKITPQQIKLIADDFFEKIKKGKNILNIKYKDVRKTLNLSEDVKIFNKDDSYLKDGKSVENSIIKFHFISNLSKIDNSFILNSLKQDNKYEVLKEIFDILEFEKSPKSIYVKLKTLVDDETIIDLIKYKNGNSLNISAYAMIKFIPYFEQGLTLSDIKKKLNIKESEDYSIFKKGIKYLHVSQFEKDNDNLEINNHSVKYVVSATLRLIKHLHTTYSTFDEIRVESTRELSQNEETRRNIEKANRALEKQIDEVLLNKEYQEIANQYGKNLRKYARKILMYKEQEGRDIYSGEGIEFKKIFTNEVDLDHIVPQSLGGLSVKHNFVLAHRDSNVRKSNQLPIDFVSDKQAFINRVDNLYKEHKINWKKRKNLLANNLDEVFKDTFESKSLRATSYIEALTAQLLKRYYPFANEEKQVDGSAVRHIQGRATSNIRKVLNVKTKVRDTNIHHAIDAILIGLTNESWIKKLSNTFRENGGVIDDEARAKIKKDIPLIESIVPKELVAMIEENYNSFGEDSVFYKDIFGKTKTVNFWVSKKPMSSKVHKDTIYAKKDDGIFTVRENIIEQFIALKITPETSSNKFVENFNKKILQKMYLFKTNPKDVICLVVQNRAEDIKNMLDSFDGIDAKNKELMSEAKQKLEGLIHSNLVDNNRNIIRKVKFYQTNLTGFDVRGGWATMEKTFIGFRATFENGELSYRRIDVINFKQMNNKNDGSFKVYKNDLVFFVYLDKTIKGGKIVSFLENKKIAAFSNSKFPSAYKFQPNSFCKDKSHTGAKQHSVGSAIGIIKLNLDILGNIKSYQVIGNAKSEFLETIKGIVNG

SEQ ID NO: 1192 - protein, 1127 aa, synthetic construct; identical to SEQ ID NO: 1172
  REGION 1..1127: note = MG86-80 effector

SEQ ID NO: 1193 - protein, 1117 aa, synthetic construct; identical to SEQ ID NO: 356
  REGION 1..1117: note = MG86-81 effector

SEQ ID NO: 1194 - protein, 1122 aa, synthetic construct; identical to SEQ ID NO: 357
  REGION 1..1122: note = MG86-82 effector

SEQ ID NO: 1195 - protein, 736 aa, synthetic construct
  REGION 1..736: note = MG86-83 effector
DALEKENGYEILKDIFEVLQFSKDPKYIYEQLKDKIDDKTIIDLIKNKTGNSLNISQNAMIKFIPYFEQGLTTDEIKEKLELNRSEDYSEFKKGIKYLNIKQFEIDDNLVINNHPVKYVVSATIRLIKHLHTTYGTFDEVRVESTRELSQNEETKKEIDKANRALEKEIDEIVANKEYQKIAEHYGKNLRKYARKILMWQSQDYIDIYNGVTIGVEDIFNNSVDLDHIVPQSLGGLSVKHNFVLVHRDTNLQKSNQLPMNFIKDKQEFINRVDSLFKQRKINWKKKINLMATTLDETFKDTFESKSLRATSYIEALTAQILKRYYPFPNKEHQKNGISVSHIQGRATSNIRKLLKVKTKVRDTNIHHAIDAILIGLTNKSWLQKLSNTFRDNMGVIDDKAREKIKKDIPLIEGIEPKELIEMIEDKYNEYGEDSVFYKDIWDKTKVVNFWASKKPMVSKIHKDTIYSKKEDGIYTVRENIINNFIALKVTVTTSSVKFEESFKKNILNKMYLFKTNPNDVICKVVQQRAEDIKVLLNSFVDIDTKDKELLSNSKIKLDELIHSDIIDNNGNAVRKVKFYQTNLTGFDVRGGLATKEKTFIGFKANIENDKLNYMRIDVANWDKIQKLNDNSFKVFKNDLVFFIFHDASFRGGKIVSFLSEKTQGAFSNSKFPSASKFQPFSFCKIGNGEKTGAKYQALSKSIGIVKLNLDILGNIKSYQKIGSCESELLEFIKEIK

SEQ ID NO: 1196 - protein, 1123 aa, synthetic construct; identical to SEQ ID NO: 368
  REGION 1..1123: note = MG86-84 effector

SEQ ID NO: 1197 - protein, 904 aa, synthetic construct
  REGION 1..904: note = MG86-85 effector
KLGALSNIEVEKFIKDIKEIIDDQKDANNDLSLFGNCQYYSKYKVAPQYSLLSDIFNMYQSVSNITFNKEKRAITKEEIKKVEEFFYKKIEKGKSFSEITFKDIREILDLDKSIRIFNKEDFYFQKGKKVYERIAKFNFLPSLSKIDNKFIKTILKQDNYLDILDEIFTILQQEKAPKSAYKKLEKIFKAYKLVEDEDRYKKIIISLIKEKNGRSLHISHYAMKQFIPYFQEGLNTQTIKETLNLITTEDYSKYKKGIKYLTLKQYEEDENLEINNHSVKYVVSAVLRLIKHLHTLYGTFDEIRVESTRELSLNEEAKRNIEKANKEQEKKFKEILENKEYQEIAKTYNKSLKKYAKKIMMWEEQKGLDIYSGKTIGFDDIFANRVDIDHIIPQSLGGLSVKHNLILAHRDENIKKSNRLPLDFVENKIDFIKRVEYLFSEHKINWKKRKNLLANNLEETYKDTFESKSLRATSYIEALTAKVLKYYYPFKEKQKLKDGSAIRHIQGRATSNIRKLLDIQPKVRDTNIHHAIDAILIGLINHSWLQKLSNTFRENRGVIDSKAQRKIKKNIPLIEGLEPKNIIEKIEENFNIYGEDSIFYKDVFGNRKSVYYWVSKKPMVSKIHKDTIYSKRTNGIFTNRVDIQKEFINLKLKPTTPLEKFQKDFEKNILSKLYLHITNQNDAIYIAIKNRAKEIENLLRSFKTLHSKDKGQLEEAKKRLDSLIHSPIKDNNSNIIRRVKYYQKNLSGYEIRGGLATSEKSFIGFRAYKRNGKIIYDRIDLSNFNILKKENDNSFKVYKNEIIFFIFKDNSFKGGKIVSFLEDKKIASFQNPRYPSAIKFQPENFCTIGKDKNGNKKKISSKQHKIGKAIGIIKLNLDILGNIKSYQKFGEVNPQVENILLQKE

SEQ ID NO: 1198 - protein, 1104 aa, synthetic construct; identical to SEQ ID NO: 371
  REGION 1..1104: note = MG86-86 effector

SEQ ID NO: 1199 - protein, 1119 aa, synthetic construct; identical to SEQ ID NO: 373
  REGION 1..1119: note = MG86-87 effector

SEQ ID NO: 1200 - protein, 1107 aa, synthetic construct; identical to SEQ ID NO: 384
  REGION 1..1107: note = MG86-88 effector

SEQ ID NO: 1201 - protein, 1117 aa, synthetic construct; identical to SEQ ID NO: 369
  REGION 1..1117: note = MG86-89 effector

SEQ ID NO: 1202 - protein, 1122 aa, synthetic construct; identical to SEQ ID NO: 377
  REGION 1..1122: note = MG86-90 effector

SEQ ID NO: 1203 - protein, 1138 aa, synthetic construct; identical to SEQ ID NO: 378
  REGION 1..1138: note = MG86-91 effector

SEQ ID NO: 1204 - protein, 1126 aa, synthetic construct; identical to SEQ ID NO: 379
  REGION 1..1126: note = MG86-92 effector

SEQ ID NO: 1205 - protein, 1144 aa, synthetic construct
  REGION 1..1144: note = MG86-93 effector
MDNNMSKKILSLDLGITSIGYSILEEFKNDRYSLVDYGVSMFDKATDKDGNSKKLLHSASASTTKLYHLRKERKKALSQLFEEFGFGKKKYFLYQEKQNKYKNKWELRAKKAFEEKLKIEELFTILYTLAKHRGYKSLDSDDLLEELCSKLNIIMDEKKAKKADDEKGQIKKALLTIEELRKDSDKTVAQIIYELEMQKENPTFRNHDNYKYMIRREYIDEEIENIILSQVTFGLFSDTFDSDEFIEKLKKIITFQNPSTNDMSLFAPCEYFDEFKSAHQYSIISDIFKMYQSVSNINFNKEKTPITKEQIKLISDDFFMKIKKGKNIPDIKYKDIRKTLKLSDDIKIFNKDDEKLTITKFHFLCSLGKIDNTFIVEALEKKNGYEILKGIFEVLQLSKDPKDIYEQLKEKIDDQTIINLIKNKTGNSLNISAEAMIQFIPYFEDGFTMDKIKGKLNLNRNENYSEFKKGIKYLNIKQFEYDDKLEINNHPVKYVVSATLRVIKHLHTTHGIFDEIRVESTRELSLPTKEQVSKAKKSGKPLSKKQKTRESIDNVNKKNEAKYLAVLNNTVYIDTSNKYNKNIQKYKERLVIYEEQKRRDIYTWKGIELEDIFKDKLEIDHIVPQSLGGLSVKHNKVLCFKSSNAEKSNRLPMNYIKDTESFIKNVKYLYSKGCINGKKLKNLLATNLDETFKDTFQSKSLRATSYIEALTAQILKRYYPFKNEKKQKDGSSVRHIQGRATSNIRKVLKVKTKVRDTNIHHAIDAILVGVTNQSWLQKLSNTFRENMGVIDDKARENIKKDMPLFEMIIDDEVQYLEPKELIEMIEDRYNEFGEDSIFYKDVWGKTKAVNFWVSKKPMVSKIHKDTIYSKKQDGIYTVRENIINQFINLKTTISTTSVKFEESFKKNILNKMYLFKTNPNDVICKVVMKRAEDIKVLLDSFVDIDTKDKELVSQSKQKLDELIHKDIKDNNRNVVRKVKFYQTNLTGFNIRGGLATKEKTFIGFKASLEDEKLHYTRIDVSNFDKIRKENDNSFQVFKNDLVFFIYPDGSFRGGKIVSFLEDKKIASFSNPKFPSASEFQPISFCKIGKDSNNNPKKSGAKQQGINASIGIIKLNLDITGNIKSYQKIGRCESELLEFTKDIKV

SEQ ID NO: 1206 - protein, 1139 aa, synthetic construct
  REGION 1..1139: note = MG86-94 effector
MKKILSLDLGITSIGYSILNELDNDKYSLIDYGVNMFDTPYDKDGKSKKVIHSQNTSTTKLYKLRKQRKKNLAKLFEEFNFGKKEEFLLQEKKNLFINKWEIRAKKSFEEKLTFQELFSILYLLAKHRGYKSLDTDDLLEELCEKLGLNQEAKKEKAVDEKGKIKQALKTIETFKSQFPQKTIPQIIYDVESQKENPTFRNHDNYNYMIRREYINEEIKVIILSQEKFGLFDKNFDTKLFINKIIETIDDQKESSNDLSLFGNCEYFKDEKVAHQYSILSDIYKMYQSVSNITFNVKPTIKISKEQIKLIADDFFDKLKSGKSISDIKYKDIRKVLKLSNDIRIFNKEDNYITKDKKQENTITKFHFVNSLSKYNKDFIKNILNKSNKYEILKAIFDVLIYEKQPKPIYDKLNEIFKNYDLISDENIKNNTILELIKNKTGKSLSLSHNAMINIIPYFEDGLTIDEIKQKLNLNREEDYLSFKKGIKYLSISQFEKDNNLVINNHPVKYVVSAVIRLIKHLHVTYGAFDEIRVESTRELSLNDESKKNIDKSNRENEAKITAILENIEYQKIAQNYGKNLQRYARKILMWEEQERFDIYNGKSIGFTDIFSNSVDIDHIVPQSLGGLSVKHNLVLVHRDTNLQKLNQLPLNFISNKEEFINRVEHLFKEHKISWKKRKNLLATNLEEIYKDTFESKSLRATSYIEALTAQILKRYYPFVNQSKNSIEVRHIQGRATSNIRKLLKVRTKVRDTNIHHAIDAILIGLTNQSWLQKLSNTFRENMGIIDDAARQNIKKSIPLIEGIEPKELITIIEDNYNIYGEDSIFYKDIFNKTKAINFWVSKKPMVSKIHKDTIYGKKPNDFYTVKENILNQFISLKITNITQSDKFYEDFKKNILEKMYVYKTNPNDVICKIIQDRAYEIKELLISFEIIDKKNKEALSEAKQKIDTLIHKPLLDNNDKPIRKVKFYQTNLTGFNIRGGLATKEKTFIGFKAILENDKLAYERIDVSNYQKLKAQKDNNFKAFKNDIVFFVFADNTHKGGKLVSFLEDNKIGAFQNPKFPSLLKYQPESFCIIGKDKENKPKKSASKQHKLGKAIGIIKLNLDILGNINSFQTIGNVQSELYNFLKELKNGMESNTSN

SEQ ID NO: 1207 - protein, 1082 aa, synthetic construct
  REGION 1..1082: note = MG87-61 effector
MAKNYIIGLDLGENNVGWSVIYPETNKIENKGVRLFNIAAAAADRRTSRDTRRRLKRRDNRLKESLILFESIQFPNENTIDANLLQKRIDGLKQQIEKQDIVNITCYYMTHRGYIPFGDEERELIQLNGKYPCEYYKDLIQKIGKYRALEQVVNHTDLLKEFKAILTNQMQYYPEIGKIIGDENQGLLWIFSRKRKFWEGPGSEKSFTPYGRFKDENDVVNYQKLKSTGKEKYLFEDLIGHCKIYPNEKCAPKANYYAEKFNLLNDFINIRINNYENIKNQNYIECHKAIHTKDTYYKLTNKALEDIFNYCIQFDEKSLQYTKVLKEVLGLNKNDISGYRIDKDGKPKFSLMNNYRLIKRLYKENDISFEWLNDLDSYNLLIANLAVVPGVVELTKMLDSIHKCDEKEQEILRTVQQKLKENRSLEYHALSEKALKRAINDMISTGMNYEQVSKKFDYEKEARELMVNGYGNGEGRLLMTSKYVDEIIASPAVKKTLRQSIRVINAIIEKEGEYPAVISIESAKEMNGDDRRKEIEKEQKLQEKYRQDAEEILKSCNANITNKNIEKVMLFEETNGHCAYCGKPVSLNDVLAGSYEVEHILPLSQSCDDSFNNKTIACRDCNARKGNKTPFQFLSDAEFDELSKRIKTMKLPEEKKYNLLYSEDVNKHQIRFFNRSLRDTSYATKELVNQVHLFNEYLKSNLNNTEIKTLSTPGQLTHKIREEWNLEKNRDIGKFHHAVDASIVAGIATTSIGKLIIQSQNDSQYWILHKDDLNQIPKLVTTFSMPEYKDKVSVIQSDDDVQISMQVNKDINRGFSNANITKFIKKDNEYYKIQQISDIYTPDLMRTDKKNLDILFDEKNPKYTLLCQEQDPKLFKMLQHIYTQYQDANTNPFVNYCKEKLPEDSKFNPLINGIRTPSKSGKGILVTKLRYMQSVENPYLLNKANIHKKENTLIGLDSVSIYCTRLYWDKDKKKILFMPIYAPVVNPVTGKINEQHPLYKLYYEQCIEGKNVQFIVDLFNGNYVEIEKSDGTTIKEYIKGYAKASSSIQCKSGKYLSPKDKFTLYDVDVLGNKIKRLTWPQD

SEQ ID NO: 1208 - protein, 1096 aa, synthetic construct
  REGION 1..1096: note = MG87-62 effector
MKEKKYIIGLDLGINNVGYSVIDEESKKILKKGVRLFNTADKAEERRIARNTRRRLKRRSNRVDETLKLFKSIHFPDEITIEPDLLQKRVKGLHEKLESQEIVNIICYFMMHRGYIPFGDEERTLVELNELFPCEYYLKKWREIGKYRALEEVVNHQDLKREMIALLENQMKYYPELSQIVGNEEKGLLWIFSRKRKFWEGPGSTRSFSEYGRFKNEEDVLKYQELKKEGKEKYLFEDLIGHCKIYVNEKCAPKANYYAEEFNLINDFLNIRVINRENILKESYVHQDTSKAYHLTTDAIEAIIEYCKNFTGKILSYNKVLKDVLGLTKEDIAGYRIDKDGKPLFSLLNAYRSIKKNYEEKNLDSSWLINDLENYNRLINILAVAPGKVEIAKMLENIHKFTQEELDVIGKIQEKLKKDRFLDYHALSEKALTRAIQDMKATCLNFMQVSKKFDYEKEACEYYLKNYGTGEGTLLMTSKFIDEIVASPQVKKTLRQAIRMINAIIEEQGNYPSVIAIESAKEMNGEEKIKEIERVQKIQEKLRKDAKTILENTVSDDKVTDNMIERVILFEEIDGHCPYCGKAININDVISNTAEVEHIIPISQSADDSLENKTIACRDCNSKKKNKIPFSYMSSTEFEEFTKRVLQLNISEKKRQNLLTTDDPNKYQTRFFNRNLRDTAYATKELVTQVRLFNEYLKANLKGEKIEIKTLSTPGQLTHKVRRWWDLDKNRDIGKFHHAVDASIVAGIATTPIGKRIVEAQNNSQFWIKEKDKVKSIPKLLEKFTMYDMKEEISKIQSDEDIFISMQVNKEANRSIANSNIYSYIKKEEEYYKIDQISDIYAPDLFKKNESLLNELFDETKTTKILLCQEKDPKLFRYLREIYYKYQDGKTNPFRNYCEELMEDKSKKFNERTDGIFTPSKNGIGVLVKKLRYMQRATDPFVLNKKTINKKENTYIGLDNVAIYCTKLYWDKDEKKILFFPIYLPVLKFDKKKGNDQHPKINDQHPLYQLYYNKLLKGKRVEHIVDLYNGNFIKIEKNKKAPTFEYVSTFDKNSGNVRCKLLNGKNGSRISSKDKFTLYDVDILGNKKKRLTWPKE

SEQ ID NO: 1209 - protein, 1096 aa, synthetic construct
  REGION 1..1096: note = MG87-63 effector
MKEKKYIIGLDLGINNVGYSVIDEESKKILKKGVRLFNTADKAEERRIARNTRRRLKRRSNRVDETLKLFKSIHFPDEITIEPDLLQKRVKGLHEKLESQEIVNIICYFMMHRGYIPFGDEERTLVELNELFPCEYYLKKWREIGKYRALEEVVNHQDLKREMIALLENQMKYYPELSQIVGNEEKGLLWIFSRKRKFWEGPGSTRSFSEYGRFKNEEDVLKYQELKKEGKEKYLFEDLIGHCKIYVNEKCAPKANYYAEEFNLINDFLNIRVINRENILKESYVHQDTSKAYHLTTDAIEAIIEYCKNFTGKILSYNKVLKDVLGLTKEDIAGYRIDKDGKPLFSLLNAYRSIKKNYEEKNLDSSWLINDLENYNRLINILAVAPGKVEIAKMLENIHKFTQEELDVIGKIQEKLKKDRFLDYHALSEKALTRAIQDMKATCLNFMQVSKKFDYEKEACEYYLKNYGTGEGTLLMTSKFIDEIVASPQVKKTLRQAIRMINAIIEEQGNYPSVIAIESAKEMNGEEKIKEIERVQKIQEKLRKDAKTILENTVSDDKVTDNMIERVILFEEIDGHCPYCGKAININDVISNTAEVEHIIPISQSADDSLENKTIACRDCNSKKKNKIPFSYMSSTEFEEFTKRVLQLNISEKKRQNLLTTDDPNKYQTRFFNRNLRDTAYATKELVTQVRLFNEYLKANLKGEKIEIKTLSTPGQLTHNVRRWWDLDKNRDIGKFHHAVDASIVAGIATTPIGKRIVEAQNNSQFWIKEKDKVKSIPKLLEKFTMYDMKEEISKIQSDEDIFISMQVNKEANRSIANSNIYSYIKKEEEYYKIDQISDIYAPDLFKKNESLLNELFDETKTTKILLCQEKDPKLFRYLREIYYKYQDGKTNPFRNYCEELMEDKSKKFNERTDGIFTPSKNGIGVLVKKLRYMQRATDPFVLNKKTINKKENTYIGLDNVAIYCTKLYWDKDEKKILFFPIYLPVLKFDKKKGNDQHPKINDQHPLYQLYYNKLLKGKRVEHIVDLYNGNFIKIEKNKKAPTFEYVSTFDKNSGNVRCKLLNGKNGSRISSKDKFTLYDVDILGNKKKRLTWPKE

SEQ ID NO: 1210 - protein, 1086 aa, synthetic construct
  REGION 1..1086: note = MG87-64 effector
MKQSNYVIGLDLGVNNVGWSIVDLDNKKIEKCGVRLFNPSDDAQTRRGARSVRRRLKRQRNRVNDSIKLFRSVGFNDKPCIDKELLFKRVKGLKEQISKQDIINIVKYFMSHRGYIPFDDEEVNFVDLDGNYPCTYYYNLLKNNGKIRAQNETVKTKDLKRELTDILNCQIKYYPKLKKISDNLINIFSRKREFWQGPGSEKSLTPFGRFKNEEDVIMYSKNKEQNSSYEKYLFEELIGKCNVLYLNEKCAPIANIYAQKFNLINDFTNITFNDISDTLNMDLFREVDNGYKLSDLGIQSIIDYCFNCDSTLKLEKMFKELFNLSIESATGYRQDKDKKVEMSTLDAYRTIIRTIKKNGYAKPKWLEDFNLYNIMMYYINVVPSSIMLIDMLKKDKEFKKYINNEDIELIKKIYETIKAKYSGYHSLSEKALVKSINDMLATGLNYQQVRKKFNYDKAFKEECAKNYVSANGSVKLSDKFIDDLIASPQVKKTLRQSIKVINAIIKEKKSLPYCISIESEKEVNGKERIKEINAEQKIREDLRKRATALIESNGYKVTEALITKVMLYEEINGYCPYCNSQKINLKDVLDNKIEVEHILPLSQSADDSYNNKTLSCRACNDSKSNKTPYDWKKSSDYEEFKKRIIDNKNFSEKKKANFLFEENLDKYSTRFINRNLRDTAYATKELINQIKMFNYYLDDKYSKTIKTLSTPGQITHKIRDNYNLAKNRDIGKFHHAVDASIVASIADTNIGEIIINSQNDEKYWLIEKTYRIDDNKKKSLARYLENVNLDKYINDIKKIDSDNKIYISSQVNKSAQGQLSDANISKIININNQLYKVSQISNIYEEDTKKLDEYFNDDSNKVHLMIKDNNPKLYNKLKDIFNQYKDQKGNPFKNYCYDRNYNEDFQEIKEFNYLKHGIKASDNPNSPMVLKLRYYSTINNPYFIEKNNINKKDKTLIALDSLKQYCTEIYYDIDHNKFAFLPVYSVSVDLNHKKINREDSYYKKMREVYLKDSTVEYITTIFNGNYISVIKKNGFIINGFYRYFHRTNNKLLLKNDEALTSSDKSFTIYDVDVLGNKKERLTYSIK

SEQ ID NO: 1211 - protein, 545 aa, synthetic construct
  REGION 1..545: note = MG87-65 effector
MKKYTIGLDLGINNVGWAKYDLETKKVIDKGVVRFKESSTAQDRRIIRGSRRLRKRKQHRVERLAIQLSNINFCTSRSYEPELLNKRIKGLNESLSEQEITNIIYWFAIHRGYIPFDEEKPEREVHKFAEDEYPCQYIFDYYKEYGVYRGQCDLISLKDNLKELKQILLTQQKYHSKLTDEVIDNILYIIQSKREFWEGPGASKENQLSPYGRYRTLEDLEKYKADSTYHQYLYEMLIGKCELSIDKDGFMDQVAPKCNFYAEEFNFYNDFINMSVKEPSQIDEEYRNKITLKGKFTKDTIEEIKKEILNTKTVSLEKLVKKVLGLELKDIQGYRIDKKYKPEISKFEFYKYLLKSFKDKKLNPHWLENDDKTIYNQIIYILTVAPSTYAIEDMLKDRVKEVEFKKEEIDVLIDIKKKKNPDLKYHSLSERILKKALDDIKRHNCEYNFMQIMKRLEYEKEMKEYFQNNYSTKTQSPYTIEDQYIDHLIANPQVKKTLRKAIKVINAIIKKEKNYPETIVIESATSLNSKERKKQIKAEQKNMIN

SEQ ID NO: 1212 - protein, 558 aa, synthetic construct
  REGION 1..558: note = MG87-66 effector
MQLLINWKETNESCIYCGESISLKEVLTTEIEHILPKSKSMDNSHNNTTCSCLKCNKEKNNRTPYQYLTSENRYEGFKNRVMNQYDKMSQDKKSNLLFEGDIDKYSIKFINRNLRDTSYASVALVQELKKYNEYLGAKEGYKINIITSPGQLTSKIRQYLKIKDKDRTYLYHHVVDAMILASIPDTEIGKVLIEAQNDSQYWFKDKNKENKYKEEVYNMLNHVWLSNRDQIQKFNQDCDNMPEDNKDGLIKRSYEVLKNPIQQFSQYTEYAKYIKQDDGYYKILQVDNIYNLLIRKKDGSVDKDKQLLDELFDLSNKKTISLLCEKKDPKLYQKLKDIYIKNASSINPFVDECKYMYGLEEGDKFNYLKQGIRKTDNPNSPLVIRLRYLKRVTNPYIKNNITTRRKNVYNEFTINKPKKDTIIGLDGLKQVSTRIFYSYDDKKFIFLPICAISFVNGKLNKKEKNYQTTYNRLIGNKNVKEIGNIYTGEWVGVYKKNGEYLEGRYKGYHKTSNVLEYYINGLDTLSCVKICSSDLRIIIYTTDILGNRHIRLDTQKEI

SEQ ID NO: 1213 - protein, 1114 aa, synthetic construct
  REGION 1..1114: note = MG87-67 effector
MGKYSIGLDLGINNVGWAIYDLEEKQIIDKGVVRYEKASGAQDRRKVRGSRRLTKRRRHRVERLAQYLYKIGFWTKRSYEPDLLQKRIKGLKEELTEQEITNILYYFSIHRGYIPFDEEKTDREVHHCGDDELPCFYIQSYYEKYKKYRGQCELILMKDNMRELETLLQNQKQYHSKINNEVIQNIMDIIRSKRQFWEGPGGAKDNQLSPYGRYATVADLEELAKDPTYHKYLYEVLIGKCELSMDNTGNMDPVAPACNYFAEEFNFYNDFINMSVKEPSNIEEEFQYKIKSNSGKFTEETIEEFKEYILNNKTINFNKMLKKILGLQEGDIQGYRIDKNRKPEFTKFEFYKYVKEQMEAKELHPDWLDDVDKVIYNKVVYVLTVAPSTYAIEDMLTDRISNISFSKPEIEILQEIKRKKNDQLKYHALSESILKKALNDIKKHHCEYNFMQIMKKLEYEKEMREYFQNHYSSKTKEPFPMEDKYIDDIIANPQVKKTLRKAMKVINAIMQQQKDYPDTIVIESAKEMNGDKAKKKIEKEQLMYEKQNEDAKKILIDEGFHVNNKNIDKVILWQETNHKCAYCGENVPLASLLQTDIEHILPKSKTMDSSLRNLTCSCPQCNKEKSNKTPYEYLSGQNKYQGFKERILKEFTNMPESKKNNLLFEGSIDKYAIKFINRNLRDTAYGTVALIEELEKYNTYLAGKIGYQINIISAPGQLTSKIRRNLDLSEKNRDYLYHHAIDAMILAGLCDTPIGQVLIKSQNDSKYWIGIKDKQHYESVYQMIAGVHLSCGKQIKEFNEACDNQPSDNKEGLLKRSYEVLKNPIRQFSDTNYAKFIKRGDTYYQICQIDNIYSYDEKKDKKLLDKLFNPDDHTVELLCYEKDKQLYHKLKQIYDSYPEEGNPFRKECIYKNGLEEGTEKFEYLLHGIHRSDDKKSPIVVKLRYMKKITNPYIKQHLSLRKKNQHSEFIDMPMKQATNIGLTSLSQVSTQILYGIEDKKFIFLPIPSICYQNGRLNTNHPYYIETYNRLVGSQKAIEFASIYCGEWVGVIKRNGEYKEGRYSTYNKNNNNLILDTNGLKSVSETYITANDQAIIIYTTDILGNRYVRLDSRKIL

SEQ ID NO: 1214 - protein, 1123 aa, synthetic construct
  REGION 1..1123: note = MG87-68 effector
MKKYTIGLDLGINNVGWAKYDLETKKVIDKGVVRFKESSTAQDRRIIRGSRRLRKRKQHRVERLAIQLSNINFCTSRSWEPELLNKRIKGLNESLSEQEITNIIYWFAIHRGYIPFDEEKPEREVHKFAEDEYPCQYIFDYYKEYGVYRGQCDLISLKDNLKELKQILLTQQKYHSKLTDHVIDNILYIIQSKREFWEGPGASKENQLSPYGRYRTLEDLEKYKADPTYHQYLYEMLIGKCELSIDKDGFMDQVAPKCNFYAEEFNFYNDFINMSVKEPSQIDEEYRNKITLKGKFTKDTIEEIKKEILNTKTVSLEKLVKKVLGLELKDIQGYRIDKKYKPEISKFEFYKYLLKSFKDKKLNPHWLENDDKTIYNQIIYILTVAPSTYAIEDMLKDRVKEVEFKKEEIDVLIDIKKKKNPDLKYHSLSERILKKALDDIKRHNCEYNFMQIMKRLEYEKEMKEYFQNNYSTKTQSPYTIEDQYIDHLIANPQVKKTLRKAIKVINAIIKKEKNYPETIVIESATSLNSKERKKQIEAEQKKYDKLNEEVKNELEANGYEATDKNMQLLINWKETNESCIYCGESISLKEVLTTEIEHILPKSKSMDNSHNNTTCSCLKCNKEKNNRTPYQYLTSENRYEGFKNRVMNQYDKMSQDKKSNLLFEGDIDKYSIKFINRNLRDTSYASVALVQELKKYNEYLGAKEGYKINIITSPGQLTSKIRQYLKIKDKDRTYLYHHVVDAMILASIPDTEIGKVLIEAQNDSQYWFKDKNKENKYKEEVYNMLNHVWLSNRDQIQKFNQDCDNMPEDNKDGLIKRSYEVLKNPIQQFSQYTEYAKYIKQDDGYYKILQVDNIYNLLIRKKDGSVDKDKQLLDELFDLSNKKTISLLCEKKDPKLYQKLKDIYIKNASSINPFVDECKYMYGLEEGDKFNYLKQGIRKTDNPNSPLVIRLRYLKRVTNPYIKNNITTRRKNVYNEFTINKPKKDTIIGLDGLKQVSTRIFYSYDDKKFIFLPICAISFVNGKLNKKEKNYQTTYNRLIGNKNVKEIGNIYTGEWVGVYKKNGEYLEGRYKGYHKTSNVLEYYINGLDTLSCVKICSSDLRIIIYTTDILGNRHIRLDTQKEI

SEQ ID NO: 1215 - protein, 1097 aa, synthetic construct
  REGION 1..1097: note = MG87-69 effector
MKKYSIGLDIGINNIGWSIVNMEEKKVEKCGIRQFSVSAGAKERREIRNSRRRLKRKDTRKKDILSLCNKIGFPNKNTIDEKLIEKRVKGLKEKLEKQDIVNILCYMVTHRGYIPFGDEEVEFVNLNNKYPCEYYYDLYKNTTNNKYRNSKLIVKNSDNIREIKKILETQKKYYKEITEEFIANIIGNEKTSGVFNRKRKFWEGPGSINSLTEFGRFKSEKDVENYLEMKKNNPNYEKYIFEDLIKKCEIEPEEKCASKLNFYAEKFNLLNDFINIGFKNIEDLTNQDCFYLHKNGMYKLNRQGLEKVFEYILDSKTVITKSLFKKLFNCDIENLSGYRIDKNRKIEISTMNGYRSIKNSFLENEGNIELINNIDDYNKIINAMTIAPGTIEVIRMINNNGIYLSQNDENSIKASYKKVKGIKYHNLSEKALKRAIDDMLKYQLNYQQVNKKLNYNKKAREIFIEEYKKVSLNKKLDNITNRFVDDIIASPQVKKSLRQSIKVINAIINEKGYYPDTIVIESTKEANGEERKKELEEIQRKKEKLKKDAKELLEKISPEQITSKNIEKVVLYEEINGQCPYCGKSLDIMQVLNGGVDIEHILPKSKTFDDSFENKTLSCSKCNSQKDNKTPMQWLQKAERKRFEDRIKSNKKISSVKKDKFLYEDDLDKYKTRFFHRNLTDTAYATKELVKQINLFNDYLKEIKKEEPIKTISTPGQLTHNIRVKYNLEKNRDEGEKPYHHAVDATILAFMPITGLGKQISNFQNNPKFFILDGKDAIMDHINNSISDYNYEKQYHKNEYDDYIKQIKEITDENKIFRSSFEVQKDCNKTLSNANILKILKKDDNYFKVEQINNIYDPNLNLKLLDKLFDDSKNITLMCQDNNKELYNKLKKIYQEYKNTNEKISIYELYCREQKGLSDEQEFNYLTDGIRSSENKNSPIVKKLRYYSPINNPYLLEKKSINKKEETLIGLDSLAQTCTQVFYNKSKNCFAFLPIYSISVDLNTRKIIKNDYYKQMYNEYIKEDEVKHIVDLYNGNYIEVTKKDGTIIKGEYKCFHKTNAVVTLKNDLYFTKQDKKLVVKDKDVIGNEKERLTFEIK

SEQ ID NO: 1216 - protein, 1097 aa, synthetic construct
  REGION 1..1097: note = MG87-70 effector
MKYIIGLDLGINNVGWSIINQETNEIEDYGVVRYQESSDAQERRRLRAARRLRNRRLHRVERLALLFKENGIPTQRTIEPELLLKRTKGLKEEIFVQDIINIIYYFAVHRGYIPFDDEKLDREVVNLEDGQFPCEYIFSEYKKNGKYRNSEKLIKCSDNIREIKKLLETQRKYHPKFTIELTDKIIEIITSKRKFYEGPGGARINQLTPYGLFRTVADLEQYKVNPNKFKYLYEKLIAKCKIALGETCAPRINYFAEEFNFFNDFINMRVKEVSLLPQIYSYKVDEKGKFIEETILEIRDYVLSNETIRLDKMFKQILGIGIDNIEGYRIDKNKKPEVSLYNFYKYVRKQFAQNGLNPIWLFDKEKVIYNKTMYVLTVVPSSVQIEEMLSERVSEYSFSPEEIKVLKEIKTKKLTNNTSLYHSLSVKVLKRALSDMKKTQYQLNYMQLMKKLDYEKEAKEFFEANYTNRTVAPYFIEKKYIDDLIANPQVKKTLRKAISVINAIIKRYKEYPTIIAIESTREMNSKAKKDAIVKEQAKLEKLRKDAITFLEENDIKVNEANILKTMCYKETNGHCMYCNNPIQASQLTTLEIEHILPISQSYDDSFDNLTVACLKCNKEKSKKTPYEFLTSINSYEPFKERVIELPISDKKKSNLLFEGDISKYELKFINRNLRDTAYGSMALVEELRKFNVFLERRANRYINLVTIPGQLTSRIRKKHELEEKDRTQLYHHAIDATIVASIANTPFGELLIKGQNDAKFWFENKEKRIELGGMLPKITLKNIENIRKINESNIKRSFEVRKSINQQISNQNPIKLVWLGNDYYKVQQINNIYEEKKNDNFIKLFDENDKKMILLCELEDPKLFKRLKEIFFSNLKANKNPFLEYCLFEHGIESTPNSFNYLIHGIKKSPKNPKSPIVKRLRYLEKRTSPYIIKKDYPNRKKNELGEFVTPKVKEKTIYGLDQLSQYCTEIYYNYETQKFIFLPIFMVSVDVNSKKINRDEHYFKETYERLIGNKKPKYIATLYNGSWCEITKKNNQTAEGRYIGYHKTNNLLTFGKDGEYSSSAPLYMSPNDKRIIIYGFNILGKKYKILDSNDII

SEQ ID NO: 1217 - protein, 1086 aa, synthetic construct
  REGION 1..1086: note = MG87-71 effector
MKNYTIGLDLGVNNVGWAIFDNEKNIIIKNGVRLFSPSDSAIDRRLARSLRRRSKREKNRIVDIYKIFVKINFPSTNTIDSDLIITRNSAIKEKVNKQDIVNIICFFLKNRGYISFADEDVNFVELNGLLPCEYFLNLKNKYGKYRAMNGETVKIEDNINEIKLMLKTQQKFYPEITDDIINSILNIFIRKRKFWEGPGSINSLTPFGRFKNENDITEYLNNKKSNAMYEKYIFEDLIGKCSININEKCVPKANFYAEKFNFLNDFINVSIKNVEGLNSDYFNYLKNSKVFKFSKTSLDKIFDYCVNNKKVDVNVMLKRLFSFEISNLDGYRVDKKGKPEFSTMSIYRSIRNTFIENNCNLDIINDIETYNKIIYYMAIVPNSFDLINIIVNDKSIDHSFSATDQCLIKEIFLKLKKNNSLTYASLCENILKRAINDMMLTQLNFMQVKKKFDYEKESRDYFVKQYSSNTDNLPLINPKFIDDIISSPQVKKTLRQAVIILNNIIKEQKQLPSIISIESTKEMNGSEMKKMIESTQRKKAALKNSAKETIKNLFGLNYINDSNIEKVMLYEEINGVCPYCGESIIKLEDVINNKIEIEHILPKSKSFDDSYENKTISCSKCNSQKGNRTPYYFLNPINQFDVFEKRINDLKNISAEKKERFLYKGDIDKYTTRFFNRNLRDTAYATTELIKQINIFNYYFESVYNNTKILTLSTPGQLTNKVRKQYSLNKDRDDGKYHHAVDASIVAAISNTELGKIIIDSQNNSKFWIKNKNELTNISDLIFDFSLKSFKNELIKFDSDEKVSLSFQVKKNPQKVFADAKIYKIINKDDHYYKIEQISNIYQIDMSIEKDKSLLSKLFNESDNSFTLLCFDNDKKLYEKLKAIYLKYGSEKGNPFVNYAIDKYQLKDEKFDMYRHGIKVSNKEKSPIVVRLRYYSIISSPYLLEKKNINKKDKTLIGFDSLKQAYTEIYADLDKKEFIFLPVFSISIDIKNNCPKKDDKYYNYYCNKFLKDKNVKFITRLYNGNYISLTKKNGETIFGEYMGYHKTNECGCLKNGKYFVKSDIAFTLYDINVLGKRKIRLTYKMK

SEQ ID NO: 1218 - protein, 1078 aa, synthetic construct
  REGION 1..1078: note = MG87-72 effector
MDNNNFSVGIDLGVASVGWSVVNLDDMSIIDKGIVKFLEAQKAEDRRNARGLRRRYSRKHHRLERLKMFLTENDISLSFTLDNELLKKRIKGLKEQIDMQDLVNIMAFFAKHRGYIPFDNESRESEKIIEFAKEGLYPCQIQEQVLQKYGEYRGIDYPILNQDFINELRCILMQQKNYYPQITDEFVNEAINIINSKRKFWEGPGGPKANQLTPYGRYTNNEDLEEYSKNKEYNKYLYEKLIGKCSIYKDEKKASMASCFAEEFNFFNDFLNLRFDGSEINDGNKKYFIERGKDLYGFTSATVRDLEEQIINSSRVVIKEILKKKFGITKIIGNRIDSSGNIEISTFNNYRRIRGKFVDENLFEEIDPKNDPDMYNRIIYILQVSPSKDTKIEMLTSEFGSQLSNETIDILSEINLENNFHKFSNEALKKYISLMERENENSSYVERKFADEINSDVEKSLIENYLNQNVQKKNLKYINIKDIDNLVASPATKKSLRKAIGVLNKLINKYQYPKYVCIETTTSLLSEEKQKEYSEMMLDNTKKRENATKNLIEAGYEASEVNIIKQMLLDETQHKCIYCGKDINVNTCEIEHILPVSITQDDTYFNKTASCGICNINKNNRAPSNFIFGDTYKEFEKRVLDSNMNQKKKSNLLFVGDLNKYEKKFKNRNLNDTAYATTELYNQLQIFKKAYAYHNDKQLDMSVLKIPGQFTGMIRKKYNLIKDRSQEYHHAVDATIIASLPDSKIGKLMNLIQNNTSKFWENCKMDEYRENLMEQMYLDIKLKKELENTNFNNTRLSMQICKNPQGKISNANIYKGIKVTGTNELARIDQIDNIYNLKKSEVEKLFKDTENGKKKLLCMHNDIKMYEMLKEIARKYDNAKINPFIAYCIENSNGEITDKTFDYTIHGIRKNEKSPIIKRLRYYEKVTEPFLLHKSSINSKEDTLMMLHSLKQYCTRVYKHKTTQKLYFLPIYTISVDMRTKKVNENDNFYKQMYNKFVDIDINELDFYMDVFNNDYLRFEDNKGNKAEGYAQCFDKTSNKIVLKNTAQNITQKTVKIEKVNMDILGLYGLNPPSSDKN

SEQ ID NO: 1219 - protein, 1074 aa, synthetic construct
  REGION 1..1074: note = MG87-73 effector
MEKFIKSNEILSFGIDLGIGSVGWSVTDLTKNKILDKGVYLFIEGKKAEERRLARSTRRLKKRKQHRLERIRLLLDEKNIKEDNTYDSELLNKRLLAIKQKVEMQDIVNIIMYFARHRGYIPYKDEDERKSEIIDELRLKGYIACEIQNEIFNNNNQYRGNEYLIQHSDYMKELQIMLNKQNQYYKEIDKDFIEKVKAIIDSKRKFWEGPGGPRENQLNKYGRYRTLHDLEEYKKNKNYNKYLFESLIGNCKVYTGEKKASAWNFYAECFNFYNDIVNLRIDGQDLDETNKRYFEVVDKNTYKLKKEAIKALKDEVLNSSAVNYPSLFKKLFLIEFSSIYGYKKDKNEKPEIAKFDKIRQIKNKLEEPKMIEELLGDINYYNKAMYLIQVSPDRQTRYEILVENLSDKYSKELLEFLASCKLDNKYHSFSEKALKVYLELMEENNQNSSYIERNFKKEIASDVEENVIKNYISENMELKYINPKYIDEIIASPATKKSLRKAISILNKLFSKYGYPEYICIENTKTLLSEEKQKEYEAKTLDNQVKRKNATKKLAESGYDTNETNIDKYLLLAETNNKCAYCNKDITVGNCEIEHILPKSKTANDTFANKTASCTQCNATKKNRTPYEFLTSNNMYADFKLRVQKNNNFSDEKKKNLLFELNIDKYEKNFKNRNLNDTAYATNELVNQINIFKKAYIYHNGGEVLDTRILRVPGQFTGIIRKRAELEKNRDLKYHHAVDAAIVSSIPKLKIGKLINIIQNEPDKYWKIDNLEEYRDSLYNELYLDKNIKEELNKADYSNTRIAQETLKKLSGPLFDANVSKLIKKGEKYYKVEQVNNIYEVTQDKIEKVFSKDKYFLCKDNDPKLYNRLFEIVDMYKGKKVNPFVEYCKENNIVGEEKFDYKKHGIRQNENPNSAVVVRLRYLVIVNTPYIVNTDKLPKRNNNNPMLMYDTLKSYCTRVYKEKETGKLLFMPIYKIFIDNNSGEIRTDSEYYKTVYNTYIKTELDNVEKYMDIYNNEYVRFFIKDECIGEGFVSCFHKTLNKIEIKNCNKSITTKVTKIEKIKFDVLGLYNLNI

SEQ ID NO: 1220 - protein, 1088 aa, synthetic construct
  REGION 1..1088: note = MG87-74 effector
MRELKNYNIGLDIGINNVGWSILNNDTGKVEHFGVRLFSPSASAADRRVTRNVRRRMKRKDTRVNDLLRLMDSIKFPSSISIDPLLIEKRYFGISKQIEKQDIVNILSYLVSHRGYIPYGDEEPNIISLNGKLPCEYYYQLFKETGKYRDLKENVSYKDNQKEIETLLEKQFEYYPELNENIVSEVIKIFVRKRQYWEGPGSINSLTKFGRFKTEQDVKDYELNKSQDSDYEKYIYEDLIGRCEIYPNEKTAPKLNYYSELFNLLNDFINISFTDIDDTNKNEYFYLSEKTKDYKLNTKGLEEVIDYCYNYEKSILKYDSLFKNIFNISIEKVKGYRIDKQMRPEFSTFNFWRIIKKEFDTNEIDCSILSDIDLYNRVMYIFTTVPGTVELERQLSGIKDKYNLSNEFIDCLKNSFRSFKKKSPSPLTYHSLSEKALIIASELMLKEAKNFMQVKNEYKLDKEKKDEIIAKYEKLNNGKAYINPIFIDDIIASPQVKKSLRQSMKVINEIIKVTGEFPKTIAIESTAEVNGDEKRKEIQLTQKLQEKLRKEAISNLEAINAEVSESNIRKMMCYIEMNGHCAYTNAPIKFHEAAIEHILPISKSFDNSIDNITISIKSVNDEKGNKTPYQYLSSKNQYEDFKNRVLNNKNLSQKKKENLLFEGDLNKYEKRFFNRNLRDTAYATKELVNQINNFNEYLKSINKDVRINTLSTPGQITSLVRRRMKLEKDRDDGKYHHAVDAGIVAAITQTPIGKKMIYAQNNEQFWVKFKEETKTLHKDLEEVVIYKNEEELKNVDSDDKIRISSQINKDPQKSLSNANVIKIIKNDEKYFKIKQINNIYEIKNYGNGKSDFELLTKLLDPSDNTKKLLIQDNHPKLFNKLVEIFNKYKDENEKENPFVLYLKDKHGLEINETIDYNKLGIRSSDKIGAPLVNKLRYMETINDPYLLEKKTIKKKDSALIGLEGLSQVCTRVYKDLDNNKFIFLPIYSISVNLETGKVKENDKYYKMYYDKYINNKNVKFIVDLYNNDLVNIIKGKGHKVSGFILGFDKESSRIRLKNGESFRLSDKSLTVYDVDILGNKKIRLTVEL

SEQ ID NO: 1221 - protein, 1090 aa, synthetic construct
  REGION 1..1090: note = MG87-75 effector
MKKYTIGLDLGVSSIGWSIINNETAEVEDFGVRKFSQSKTAEDRRVVRGGRRTRKRKLTRAKDISHILQKNNFPSKVTTDENLIKTRVKSLKERIEKQDITNILMYFAKNRGYIPFDDDSNKEKEKMKLIDLSGLFPCEYYLQTENYELNNKYRGTNEVVNLEDNIREIRSMLIKQAEFYKEISAEFIEKIIEILKRKREFWEGPGSINQLTPYGRFKSEDDVKQYILKKKSNPNYEKYLYEELVGRCSVYINEYCVPKINYYAEYFNFLNDFINIRFNSWEEIEDQKKPLYYQEKNKPIKLNKDGLLEIKDYIISNRTTSIPTIIKKVLGTNEDNIDGYRRTEEGKMEFSLFNFYIYIIKQFEKNNLSSQWLNNIDNYNLVIYYLTITPGIIEFKKTIQGVEELKDIFNEEDFNLLAEIKRKKSSEFAYHSFSEKLLTKAIDDMIKHMMNYMSVSTLLKYNEEKENDLKANYLKEYRELPLLTTKYVDDIIASPQIKKTLRQAIRIVNEIIKNKGYNPYCIAIESTKEMNGKDRKNQLLREQENNRKNREKAKEFIASNFGEKNVTNKSIERVMLYNEINGHCPYCEIPININDLIYGVVPVEHILPISASADNSYDNKTISCKNCNDLKKNRTPYQFLNRSYFEKFEKDIWSLKTISEAKKINFTSKTDVEKYGRKFINRNLRDTAYATKEMVRQIDYFNIFLDQKSNKILTLSTPGQLTAKIRESIDLEKSREVGDAHHAVDASIVGAISTTEIGETIIKMQNDSSFWLNNNTINIEHIKNISLNPDTIQKIKTISEENTKISVQTQKNPQAKLSNANLIKIIIKDGQEYQIQQIDNIYEMTNKGEEKENLIKLFDETDKTSTPLCFDNDKKLYNHIKEILTKYIELEGNPFINYAVDKYGIKYEDFDYRYHGIKTPAASENAPVVKKIRYYKKINDPYYLTIKNTKMKDNTKVAIDSLNQYCIKIYKDIDAGKFIFLPIYSVSVNLKTREINEEDYLYIKNYNLYIGDKNVEYLCSLHKGELVEVIKKNGEKYIGYVSSFDKTNNLVELSTSDKKGFKLAKGDKELTVIHKDILGNVKKRLTKSVY

SEQ ID NO: 1222 - protein, 1074 aa, synthetic construct
  REGION 1..1074: note = MG87-76 effector
MEKFIKSNEILSFGIDLGIASVGWSVTDLNGNKILDKGVFLFTEAQKAEERRLARSTRRLKKRKQHRLERIRLLLDEKKIKEDNTYDSELLSKRLCAIKQKVEMQDIVNIIMYFARHRGYIPFKDEDERKSEVVDELRSKGYIACEIQNEIYSSNNEYRGNEYLIQHSDYMKELQIMLNEQSQYYKEIDNDFIERVKSIIDSKRKFWEGPGGPRENQLNKYGRYRTLHDLEEYKKNKNYNKYLFENLIGNCKVYTGEKKASAWNFYAECFNFYNDIINLRIDGQDLDETNKRYFEVVDKNIYKLKQESIKALKDEVLNLSAVNYSSLFKKLFLVDFLSVYGYKKDKDGKPEIAKFEKIRQIKNKLEEPKMVEELLSDINYYNKAMYLIQVSPDRKTRYEILEENLSDEYSKELLEFLASCKLDNRYHSFSEKALKVYLNLMEENNQNSSYIERNFKEEINSDVEENVIKNYINENMELKYINPKYIDEIVASPATKKSLRKAISILNKLFSKYGYPEYICIENTKTLLSEEKQKEYEAKTLDNQVKRKNATKKLVEAGYEINETNIDKYLLLAETNNKCAYCNKDITVGNCEIEHILPRSKTANDTFANKTVSCTQCNATKKDRTPYEFLSTNNMYEDFKLRVQKNNNFSEEKKKNLLFELNIDKYEKNFKNRNLNDTAYATNELANQINIFKKAYIYHNGGEVLETRILRVPGQFTGIIRKRSELEKNRDLKYHHAVDATIVSSIPRLKIGKLIDIIQNEPDKYWKISNLEEYRDNLYKELYIDKQIKEELNKANYSNTRMAQETTKKLSGQLFDSNVSKVIKKDGKYYRIEQVDNIYNVLHKDIEKVFSKDKYFLCKDNDPKLYNKLFEIIDMYKEKKVNPFVEYCKENNIVGDEKFNYKKHGIRQNENPNSAIVVRLRYLVAVNTPYIINTNNLPKGRKGNPMLMYNSLSSYCTRVYKEKETGKLLFMPIYKIFIDNNSGEIRTDSEYYKTVYNTYIKTELDNVEKYMDIYNNEYVRFFIKEECIGEGFVSCFDKSNNKIEIKNCKKNLTTKVTRIEKIKFDVLGLYNLNI

SEQ ID NO: 1223 - protein, 1104 aa, synthetic construct
  REGION 1..1104: note = MG87-77 effector
MSKYSIGLDLGVNNVGWSIVDIDTAQIEKCGVRRFNTSDSAKDRRFQRNTRRRLKRRDTRKEDLLKLFGKINFPTTNTIDSKLIEKRYKGINEQITKQDIVNILCFLVTHRGYIPFGDEEVEFVDLQGKLPCEYYYNLYENSINNKYRALATTVKNTDNEREIRRLIEIQSKYYPELNENFLEQLFGKDGKSGIFNRKRKFWEGPGSINSFTEYGRFKNKFDKLDYLVQKDENPSYEKYLFEDLIGKCSVDPDERCASTGNFYAEKFNLLNDFINMYFKSIEGFSNQQAFYQKDNTSYKLTKEGLDLVFEYCLNHDTITIKKLLKDLFNTTEDNIGGFKTDEKGKPELSTMNIYRSIKKIFANKNANMEIFKEENIDKYNSIINYMGIVPGVVELINIINDMVISLDEKDIVALTDALKTNKKNLKYHSLSEKVLKRAINDMQNNCLNYMQVFKKYDYAKKSRNLFIEKYSKFSNNLSVDLLNSEFIDDIIASPQVKKTLRQAIKIINAIIEEKGNLPYSISIESAKETMNGAKKRQEYSKIRDLNTKLHKQAEEYLKSISANVTEKNIEKVMLWNEFSGVCPYCNKSVNINYLLNGSYEIEHILPRSESFDNSYENKTIACADCNKNKGNKTPLQYLNGSAKEAFINRINSNKNISDIKKKNFLYVDDISKYKIRFFNRNLRDTAYATKEIVNQINIFNDYLKYKYNDDTKKILTISTPGQFTSNIRKRYDLEKNRDAGEQPYHHAVDASIIALLPTTELGSEIIEFQNNSKFFLDTNADKKMDNIGYKMNVYYKSESNIEYDNYIIDLKKITDENKELFKYSPEVVKEANRQLSDANIIKVIFKGKDYFQISQINDIYSLSESDKKILDKAFDDSKNETLLCQDNNIKLYNKLKDIYLKFKDSKEPFVDYCREVNNLSKEDNFDYLIHGIKSSENGPTVKKLRYYIPINDPYFLEKKNINKKENTLIALDGLSQVCTRVYYNETKNCFTFLPIPAICTNLKNGKINKNHRLYKQYYDKLIGEDKVRHIVDLYNGNTIEVYKKSGEIIRGEVSYYDKTEKRIVLKKKNNENSPKKFIKNDYKLMVYDIDPLGNEKIRLTFEIK

SEQ ID NO: 1224 - protein, 1084 aa, synthetic construct
  REGION 1..1084: note = MG87-78 effector
MRYIIGLDMGINNVGWSIYDKNQQRILKSGVRMFSVSNLAADRRNFRNTRRRMKRKENRVKDTKYLLSQIAFPTDNTIDDLLIEKRVKGLNEKISKQDITNILCYMMSHRGYIPFGDEEVRFVDLDGKLPCEYYYGLYKSSGKYRALEKTVKNSENLKEIETILKKQQTYYPEITDIIIEKIKHIFLRKREFWEGPGSLQSLTPYGRYKTAQDVENYIANKNENSNYEKYIFEDLVGKCKISINEKCASKLNFYAEEFNMLNDFINISFKSLENMKNSEYIRTDKNSHKLNRSGLEAIIDYCINNEKATITKLLKEIFATKMDNLEHYRVNKNGKPQFSTLKNYRLVKRTFHEEGLSPIWLDDLDKYNQIINILTICPNSLEARKMLSSKKEYNLSDDEIEILIKLFSKFKADNMLSYHSLSETVLKRAIEDMKKYQLNFMQVRKKLDYDKEAREYFQQSYNSMGSTKLKINKEFVDDIFASPQVKKSLRQAIMIINKIIEEQKELPQTIVIESTKELNSTEKKAEIEKEQRLKEKLRKEAAEYLESTFGSEAVTEVNIEKVILYNESGGRCAYCDTQILMPELLDRSLEKEHILPISKSFDNSYDNKILSCRKCNADKGDLTPLSFVKNKEQSFIEKIKNNPNLSEQKKQNLLFDGDLNKYKTRFFHRNLRDTAYATTELIEQIKHFNDYLGSKNISKINTISMSGKITSDIRRKYNLPKKRDEKLHDVPFHHAVDAAILASVGASQLGEKITFAQNNSAFWIQQDCDKQLEIMSDMLSDFNLSKEISDIKNIENDKNFYYSSQVNKSMQSSIANQNIYKIIKKENDYYRIDQVDNIYNCDMKKPNIQKLFDRLFDENDDTIRLMCFDNDKALYKLLKDIYIKYKNFRNPFIEYAREINNLKEEDEFDYQKHGIHVPSSKRDSPLVKRLRYYTVINEPYLIEKDSIKKKELTYIAYDSLTQYCTRVYLDLDKNEFVFLPVYRISIDLNNNKINEHEKYYKKLFEKYIAGKKITFITDIYNGEFLQVTKKDGTILEGYYKGFDKTNTKATMKNGNSFTRSDQSLTIYDYDIIGNRYKRLTFNKK

SEQ ID NO: 1225 - protein, 1091 aa, synthetic construct
  REGION 1..1091: note = MG87-79 effector
MKKYIIGLDLGINNVGWSVVNADTNEIESYGVRKFNASNGASDRRNYRNSRRRLKRKDTRKEDIFKILNEIHFPNILTIDTRLIETRCKGLNEKISKQDITNILSYMAVHRGYIPFGNEEVNFVNLNGKYPCECYCDKFLNSVNNKYRAERETVTNKDNEREIRKILEIQQNFYPEITSEVIEKIIKILGRKRKFWEGPGGINSLTSFGRFKTEEDVIKYQKQKEINPDYDKYIFEDLIGKCEVDPDKKCASNGNFYAEKFNLLNDFINVSFLNIDEINNKEDFYLTKDKTYKLKESGLNKVFEYCINKENITIKGLLKDLFATNVNNMTGFRQKDHDPKKPDMSTMNMFRAFRKIFAKNNANMKIFDIKNIEKYNEIINYIMLVPGNVELINMVSSMVMSLTKNDERALKEIFKSKVKLKYHSLCEDILKRACNDMLSLQKNYMQVYKIKDYGKKSRELFIAKYDEQNKGKLQLNSCFIDDIIASPQVKKTLRQAEKIINEIIKDKKTLPYAIAIESIKEELSGNEKKKMYTDINKKNKELHNKAEETLKSLGFDTNQITKKKITKIMLYEEFDGVCPYCNKAININNLINGADEIEHILPRSDSFNDSLDNRTISCADCNRKKGNKTPLQYLTGSEKESFVNRIKSNKNISEFKKNNFLFDGDISKYKTRFFNRNLRDTAYATKELVKQINIFNDYLEFKNNIDKIMTLSTPGQLTHDIRDRYNLEKDRDAGEKPYHHAVDASIVALLPTTSIGKKILEFQNDANFFIKPNSKSVMLDIGKELKYYNTKEEKIEYDDYIVDLKRIDDINPKFMFSSEINKEPNKQLFNANMYKVIKKEDKYYKIQQINDIYDSKIDLDLFEKLFDDSKNETLLCQSQHKEFYNKLKEIYQKYKDSGISPFEAYQREVNNLSKVDKFNYLIHGIKMSENGPVVKKLRYYTPISEPYLVDKKTINKKDNTYLAYDGLSQAGIEIYYNIDKNCLAFIPIPAIAVNLKTRVINHNHPMLERYRKKYLKDSNAKRIVTLFNGNTIEIYKAKGGVIKGEVSSFDKDANRIRLKDRSSFVTSDRGFSIIDYNPIGKAQKRLTFMIK

SEQ ID NO: 1226 - protein, 1099 aa, synthetic construct
  REGION 1..1099: note = MG87-80 effector
MKYSIGLDLGVNNVGWSIVNVDTAVIEKCGVRRFNTSDGAKDRREQRNARRRLKRKDTRKEDLLKLFASIGFPAINTIDSRLIEKRYKGIHEQITKQDIVNILCFLVTHRGYIPFGDETPDIVDLQGKLPCEYYYELYKNSSNNKYRALRQTVSNKDNEREILKLIEVQNKFYPELNYDFVKKILGDETEKGIFNRKRKFWEGPGSINSYTPYGRFDSDEDRLDYLRKKDENPNYEKYLFEDLIGRCSVNPDEKCALNANFYAEKFNLLNDFINISFNTIEELDNQNVFYKVNNSTYKLNKEGLNLVFNYCLENNNVTYNNLFKKLFNTTIDNISGYKIDDNNKPKLSTMNIYRSMKRIFAKNNANLNIFKIENIETYNMIINYMGIVPGIVELINMINGFGVNLDDNDIIALQEALKTNKKNLKYHSLSENTLKMAINDMQKDCLNYMQVYKKYDYGKKSRELFINKYEQFSKNKNSLMLNPEFIDDIIASPQVKKTLRQAIKIINAIIEEKGSLPYSIAIESAKETMNGSKKRQEYSKVRDLNAKLHKQAEEYLKSNNLNVTDKNIEKVMLWNEFNGLCPYCNKTVNINSLINGSVEIEHILPRSESFDNSYENKTIACADCNKFKAKKTPLQYLVGSEKEAFIKRIEANKNISDLKKRNFLYADDLNKYKARFFNRNLRDTAYATKEIVKQINIFNNYLENKYGKEVNVLTLSTPGQFTSSIRKRYDLEKNRDAGEQPYHHAVDASIIALLPTTRLGQEIIKFQNDAKFFMNPKADEMMKHIGYEMNTYYESKEDIEYDEYIVDLKKITDTNKDLFKYSGEVNKEANRELSDANIIKIIYKDSGNKKDYYKISQVSDIYEAKIDKTLFDKLFDDSKNETLLCQDANINLYNNLKEIYTKYKESKNPFLEYCMEVNNLSQEDKFDYLKHGIKSSKKGPVIKKLRYYTPINDPYFLEKKNIKKKENSLIALDGLSQVCTRVYYNETKNCFAFLPIPAICTNLKNGKINKEHRLYKQYYAKLIGDDNVRHIVDLYNGNLIEVHKKSGEIIKGEVSSYDKTENRIRFKNRCSYMKSDKKLVVYDVDSLGNEQIRLTFEVK

SEQ ID NO: 1227 - protein, 1090 aa, synthetic construct; identical to SEQ ID NO: 415
  REGION 1..1090: note = MG87-81 effector

SEQ ID NO: 1228 - protein, 721 aa, synthetic construct
  REGION 1..721: note = MG87-82 effector
EFKKEEIDVLIDIKKKKNPDLKYHSLSERILKKALDDIKRHNCEYNFMQIMKRLEYEKEMKEYFQNNYSTKTQSPYTIEDQYIDHLIANPQVKKTLRKAIKIINAIIKEEKNYPETIVIESATSLNSKERKKQIEEEQKTFNQLNKEVKKELEDNGYEATDKNMQLLINWKETNESCIYCGESISLKEVLITEIEHILPKSKSMDNSHNNTTCSCLKCNKEKNNRTPYQYLTSKNMYEGFKNRVMNQYDKMSQDKKSNLLFEGDIDKYSIKFINRNLRDTSYASVALVQELKKYNEYLGAKEGYKINIITSPGQLTSKIRQYLKIKDKDRTYLYHHVVDAMILASIPDTEIGKVLIEAQNDSQYWFKDKNKENKYKEEVYNMLNNVWLSNRDQIQKFNQDCDNMPDNNKEGLIKRSYEVLKNPVRQFSQYTEYAKYIKQNDVYYKISQIDNIYNLLIRKKDGSADKDKKLLDELFDLSNKKNKTLLCEKKDPKLYQKLKNIYEKNSFSINPFVDESKYMYGLEDGDKFDCLKQGIRKTDNSNSPLVIKLRYLEKVTNPYIKNNITTRRKNLYNEFTINKPKKDTLIGLDGLKQVSTRIFYSYEDKKFIFLPICAISFVNGKLNKKEKNYQTTYNRLIGNKNVKEMGNIYVGEWVGVYKKNGEYFEGRYKGYHKTSNVLEYYINGLDTLSCATIGSSDLRIIIYTTDILGNRHIRLDTQKEI

SEQ ID NO: 1229 - protein, 1117 aa, synthetic construct
  REGION 1..1117: note = MG87-83 effector
MSKYSIGLDLGINNVGWAIYDFDKKLVIDKGVARFEASDTAENRRNIRNSRRLNKRKHHRVERIALLLNKINFCTKRSYEPELLFKRIKGLNDKLSQQEITNIIYYFAIHRGYIPFNDEKTDREVKKFSNDEFPCYYIKQFYDEYGKYRGNCDLILMKDNLRELKAILKKQGEFYIQLTNGVIEQILEIVSSKREFWEGPGSPKENQLSPYGRYRNLEDLQEYEKDSTYHQYLYEMLIGKCELSIDKLGNIENVAPKYNYFAEEFNFYNDFINMSVVSPTLLDEEYFYKVNFKTGHFTEETIEEFKSYILENKTIDFEKMMKKILNTDITNIQGYRQNKDKKPEISKFDFYKKLKKRFEENDLKPSWLYSEDRRIYNKVIYVLTVAPSAYAIQQMLSDRIKDIDFTNQEVEILQDIKKKNNKELTYHSLSESILKKALLDMKRSGFQYNFMQIMKKQEYDREMKEYFQNNYSKNETIPYMVEDKYVDTIITNPQVKKTLRKAIKVINKIIETQQDYPYAIEIESAKEMNSKREKTRIEAEQKRYENFNNKARKILQEEGYSVTPKHIDLVINWEETNHKCAYCGKPLNVHEVIKNDIEHILPQSKTMDNSSENTTCSCPKCNTEKNDRTPWEYLTSKNEYEKFKQRVLHEFDVSEKKKDNLLFEGNIEKYSLKFINRNLRDVAYGTTALVNELNKYNEYLYAKVGYKINIVSTPGQLTHKIRRKLELSNKNRDYLYHHAVDAMILASIVDTPIGEVLIESQNDSKYWINHNNDIYIEKVLDMIESIDLKNLSQIKEFNKKCDNQPDNDKDALIKRSFEVKRNPIRKFSDANYVKYIKKEENQYYKISQIDNIYNLIIRDKSGRDGKDKKIMDKLFDSSDSSVHLLCEEKDQKLFTKLKNIYEHYTEAINPFVAECIYREGLEENNAKFNYLIHGIRKTNNLNSPIVVRLRYLETANLPYLKELKSMKKNMLGEFIETKAKENTLIGLNGLGQVCTRLFYSLNEQKFIFMPIYAICYKNKKIDETNKYYKELYNYFVGNNDVKKLFDINCGNWLGVYKKDGTYFEARYSTYNKALNMLECKNNGNLKVYITASCKQIILFKVDILGNKYVKFDTNNFL

SEQ ID NO: 1230 - protein, 1123 aa, synthetic construct
  REGION 1..1123: note = MG87-84 effector
MKKYTIGLDLGINNVGWAKYDLETKKVIDKGVVRFKESSTAQDRRIIRGSRRLRKRKQHRVERLAIQLSNINFCTSRSYEPELLNKRIKGLNESLSEQEITNIIYWFAIHRGYIPFDEEKPEREVHKFSEDEYPCQYIFDYYKEYGVYRGQCDLISLKDNLKELKQILLTQQKYHSKLTDEVIDNILYIIQSKREFWEGPGASKENQLSPYGRYRTLEDLEKYKADPTYHQYLYEMLIGKCELSIDKDGFMDQVAPKCNFYAEEFNFYNDFINMSVKEPSQIDEEYRNKITLKGKFTEDTIEEIKKEIISTKKVSLDKLVKKILGLELKDIQGYQIDKKYKPEISQFEFYKYLLKSFKDEKLNPSWLENDDKTIYNQIVYILTVAPSTYAIEDMLKDRVKEVEFKKEEIDVLIDIKKKKNPDLKYHSLSERILKKALDDIKRHNCEYNFMQIMKRLEYEKEMKEYFQNNYSTKTQSPYTIEDQYIDHLIANPQVKKTLRKAIKIINAIIKEEKNYPETIVIESATSLNSKERKKQIEEEQKTFNQLNKEVKKELEDNGYEATDKNMQLLINWKETNESCIYCGESISLKEVLITEIEHILPKSKSMDNSHNNTTCSCLKCNKEKNNRTPYQYLTSKNMYEGFKNRVMNQYDKMSQDKKSNLLFEGDIDKYSIKFINRNLRDTSYASVALVQELKKYNEYLGAKEGYKINIITSPGQLTSKIRQYLKIKDKDRTYLYHHVVDAMILASIPDTEIGKVLIEAQNDSQYWFKDKNKENKYKEEVYNMLNNVWLSNRDQIQKFNQDCDNMPDNNKEGLIKRSYEVLKNPVRQFSQYTEYAKYIKQNDVYYKISQIDNIYNLLIRKKDGSADKDKKLLDELFDLSNKKNKTLLCEKKDPKLYQKLKNIYEKNSFSINPFVDECKYMYGLEDGDKFDCLKQGIRKTDNSNSPLVIKLRYLEKVTNPYIKNNITTRRKNLYNEFTINKPKKDTLIGLDGLKQVSTRIFYSYEDKKFIFLPICAISFVNGKLNKKEKNYQTTYNRLIGNKNVKEMGNIYVGEWVGVHKKNGEYFEGRYKGYDKTNNVLEYYINGLDTLSCTTIGSSDLRIIIYTTDILGNRHIRLDTQKEI

SEQ ID NO: 1231 - protein, 1123 aa, synthetic construct; identical to SEQ ID NO: 436
  REGION 1..1123: note = MG87-85 effector

SEQ ID NO: 1232 - protein, 1091 aa, synthetic construct; identical to SEQ ID NO: 443
  REGION 1..1091: note = MG87-86 effector

SEQ ID NO: 1233 - protein, 1123 aa, synthetic construct; identical to SEQ ID NO: 462
  REGION 1..1123: note = MG87-87 effector

SEQ ID NO: 1234 - protein, 1070 aa, synthetic construct
  REGION 1..1070: note = MG87-88 effector
MSKYIIGIDMGINNVGWSIINEEKMQIEKSGVRLFKISSSAEERRNFRSSRRRKKRKYNRIKDILKLLGSIDFPSENTIDSNLLEKRVKGLKTKISKQDIANICCYYASHRGYIPFGDEERELINLDNKYPCEYYYQLLQERGKFRALQEVVDNKDLIREYKEIINKQLEYYPELIKVKDEILNTVERKREFWQGPGSEKSRTDYGRFKTEKYKLEHGLKNDLEYLYDDLIGKCSICIGEKTVPVSNYYYEVFNLLNDFINTSIKSIDNLTKQNAVYLDKNTGYYKLTSDSLNTIINYCKQNPNLKYNDIFRDLFGLKKEDLIGYRIDKNYKPTFSTMNFYRLVKNTFETFNSDWIDDIDEYNNFIRILAISPGIVETKNLIEKYMKHSFSDKEYELIKEISSKLKSKGGLKYGALSEKILKKSINDMMSTNQNFMQVRRKFDYDKESRDYFIKSYKETEGIYLMDEKFVDDIIASPQVKKSLRQSIKVINSIITEKKAFPDVIAVESTNELNNDSKRKLIEKEQKINESARTSAREYIINNFGDSYVSEKNITKVMLYNELDGICPYCGKPFKDGLNSIIKSNIEIEHILPLSKSFNDSYNNKTLSCRSCNSNKSDRSPYMWMGPEKFDEFSERIKKLPISEEKKTNFLETNDLDKYNTRFFNRNLRDTSYATSELINQIKIYNDFLDNKLDGNVKIRTLSAPGQLTYKIRKNLGIDKDRDAGKFHHAVDASIVGGIALDNGIGSILLESQNEKEFWIKKKYLGNRIDELIFNYNNSILDDQLRNIKSDNDIKISEQVDKDFNKSLANSNVYKYLKIGNDFKKVEQISNIYDEKIMTNKIIKNLFDDNDKKVNLMIKDNNPKMYKKLKNIFEQYNNKGPSSNPFINYCLEVNNISIDEFDYTKFGIKQENGPIVKKLRYYTTANIPNLLSNKNMKKNTYIGLDSVGQAYTKVYWDKDKLKFIFLPIYSTSIDLKNNKLNKNDKTYKQFYDLYLKGKNYQFVVNLYNGNHVTGISSTGEKITGNISYYHKTNNFICLKNKKNIGTTIKQLIVYDVDCLGNEKIRLTWPSD

SEQ ID NO: 1235 - protein, 1050 aa, synthetic construct
  REGION 1..1050: note = MG87-89 effector
IIKDKGIYLFTEAEKAENRRILRGTRRRKKRKKHREERIYEILKRKNIYLKNTVDSNLLEVRLKSLKEKIEMQDIINIIFYFSRHRGYIPFKDEDETKSEKVDEIRNENYLACEIQNEIYKNNKQYRGDEYLMQHSDYMKELHEMLEEQSKYYSEIDEEFIQDIEDIINSKRKFWEGPGGPRENQLNKYGRYRTLDDLIEYNKNKNYHKYLFEDLIGNCSVYANEKKASAWNFYAECFNFYNDIVNLRIDGQDLDETNKNFFEVVSNNVYKLKAESIQNLKDVVLNSKSVNYNNLFRKIFNIDFDKIYGYKKNSEGNAEICKFEKIRSIKNKLEDEDMISELLSDMDAYNKAIYLIQVSPDRQTRYEILKDNLSNIYSEKLLTFLSNCNLENKYHSFSEKALKKYLELMQVNNENSSYIERNFESDINSDVEEELIRNYIGENIEKGNLKYINSKYVEDIVASPATKKSLRKAISIINKLFSKYGYPNYICVENTRDLLTEKKQKEYEAKTLENQSKRTNAKKKLKEQGYEENDTNIDKYILLDETNFKCAYCNKDITVANCEVEHILPRSITANDTFLNKTVSCSQCNGEKNNRTPYEYLMSIGMYSDYKERVIKNKKFVDEKKNNLLFEQNLNKYEKNFKNRNLNDTAYATNELANQLNIFKKAYLRNNYGEFLDFKVLKVPGQFTGIIRKKANLDKNRDLDYHHAVDATIVASIPKLKIGKLISMIQNEPDKYWKINNLNEYRESLYEDLYLNKDLKEDLLNADFSNTRAVREVTKKATGPLFDANISKVIIKDDQYYKIEQIDNIYNIMPADFEKEFNQNKYFLCKDNNPELYDRLFKIVELYSNKSKKVNPFVEYCKENNVKDGEKFDYLKHGIRQSNNPNSSVVVRLRFLQKVNNPYIISNKKLIKSNRENKKEILLMYDSLKSYCTRVYRDIENGKLYFMPIYKIFIDNNSGEIRTDSDYYKKVYNECVKQDIEKLEKYMDIYNNEYVRFENKKGEVAEGLVSYYDKSNNKIEIKKTSKNITANTVKIEKIKSDVLGLYNLNF

SEQ ID NO: 1236 - protein, 1091 aa, synthetic construct; identical to SEQ ID NO: 433
  REGION 1..1091: note = MG87-90 effector

SEQ ID NO: 1237 - protein, 1090 aa, synthetic construct; identical to SEQ ID NO: 410
  REGION 1..1090: note = MG87-91 effector

SEQ ID NO: 1238 - protein, 1090 aa, synthetic construct; identical to SEQ ID NO: 407
  REGION 1..1090: note = MG87-92 effector

SEQ ID NO: 1239 - protein, 1090 aa, synthetic construct; identical to SEQ ID NO: 413
  REGION 1..1090: note = MG87-93 effector

SEQ ID NO: 1240 - protein, 1091 aa, synthetic construct; identical to SEQ ID NO: 434
  REGION 1..1091: note = MG87-94 effector

SEQ ID NO: 1241 - protein, 1120 aa, synthetic construct; identical to SEQ ID NO: 409
  REGION 1..1120: note = MG87-95 effector

SEQ ID NO: 1242 - protein, 1091 aa, synthetic construct; identical to SEQ ID NO: 412
  REGION 1..1091: note = MG87-96 effector

SEQ ID NO: 1243 - protein, 1120 aa, synthetic construct; identical to SEQ ID NO: 424
  REGION 1..1120: note = MG87-97 effector

SEQ ID NO: 1244 - protein, 1108 aa, synthetic construct
  REGION 1..1108: note = MG87-98 effector
MKYIIGLDLGINNVGWSIVNQETNEIVDCGVVRYQESSDAQERRKLRASRRLRNRRLHRVERLALLFKENGIPTQRTIEPELITKRAKGLKEELSVQEIVNIIYYFAMHRGYIPFDDEKQEREVVQLDDNQFPCEFIINEFKKYGKYRNSNKLIKCSDNIREIKQILETQRTFHPELTPELTDKIIKIITSKREFYEGPGGARINQLTPYGRFRTAADLEEYKVNPQKYKYLYEKLIAKCKIALGETCAPRINYFAEEFNFLNDFINMKVKDVTLLPQEFAYKVDEKGKLSGETILEIRDYVLSNETVRLDKMFKQILGTGIENIEGYRIDKNKKPEVSLYDFYKYVIKQFSQNNLNPTWLYDKDKKIYNKTMYVLTVVPSSVQIEEMLIERIPEYSFSQEEINVLKGIKTKKITNNRGMYHSLSEKVLLRTLADMKKTQYQFNYMQLMKELDYEKEAKEYFEKNYTNRTVEPYLVEKKYIDVLIANPQVKKTLRKAISVINAIIKRYKEYPTVIAIESTREMNSKAKKDAIIKEQAKLEKLRKDAITFLEENDLRVNETNILKAMCYKETNGHCMYCNTPIPASQLSTLEIEHILPISQSYDDSFDNITCACLKCNMEKLKKTPYEFLMSINSYEPFKERVIDLPISDKKKNNLLFEGDISKYELKFINRNLRDTAYGSMALAEELRKFNVFLERKANRYINIVTIPGQMTSKMRRKYELEEKDRTQLYHHAVDATIVASIANTPVGRLIIKGQNDAKFWFENKEKRLELSKLFPYAELENIKEIKELIPKKGEELICEKDDRIKRSFEVKKSINQQIANQNIVKYKIIDGEYYLVQQINNIYEEKSNDIFYKLFDESKKDKILLCELEDPKLYNRLREIFYAHEKSKINPFLEYCLFEHGIETTPNNFNYLIHGIKKSPNKPNSPIVKKLRYLERKTNPYIFKKADLNRKRNNFGEFVIPKLKDKTINGLDSLSQYCVEVYYDSDAQRFIFLPIYMVSVDINSKKINREERYYKETVARLIGKKTPLYITTLYTGNWCKVVKRDSSFSQGRFICYHKTHNKLVFGKDGSYSSSDAFYMTTNDKQIIIYGLDILGKKYKILDSNDII

SEQ ID NO: 1245 - protein, 1108 aa, synthetic construct
  REGION 1..1108: note = MG87-99 effector
MKYIIGLDLGINNVGWSIVNQETNEIVDCGVVRYQESSDAQERRKLRASRRLRNRRLHRVERLALLFKENGIPTQRTIEPELITKRAKGLKEELSVQEIVNIIYYFAMHRGYIPFDDEKQEREVVQLDDNQFPCEFIINEFKKYGKYRNSNKLIKCSDNIREIKQILETQRTFHPELTPELTDKIIKIITSKREFYEGPGGARINQLTPYGRFRTAADLEEYKVNPQKYKYLYEKLIAKCKIALGETCAPRINYFAEEFNFLNDFINMKVKDVTLLPQEFAYKVDEKGKLSGETILEIRDYVLSNETVRLDKMFKQILGTGIENIEGYRIDKNKKPEVSLYDFYKYVIKQFSQNNLNPTWLYDKDKKIYNKTMYVLTVVPSSVQIEEMLIERIPEYSFSQEEINVLKGIKTKKITNNRGMYHSLSEKVLLRTLADMKKTQYQLNYMQLMKELDYEKEAKEYFEKNYTNRTVEPYLVEKKYIDVLIANPQVKKTLRKAISVINAIIKRYKEYPTVIAIESTREMNSKAKKDAIIKEQAKLEKLRKDAITFLEENDLRVNETNILKAMCYKETNGHCMYCNTPIPASQLSTLEIEHILPISQSYDDSFDNITCACLKCNMEKLKKTPYEFLMSINSYEPFKERVIDLPISDKKKNNLLFEGDISKYELKFINRNLRDTAYGSMALAEELRKFNVFLERKANRYINIVTIPGQMTSKMRRKYELEEKDRTQLYHHAVDATIVASIANTPVGRLIIKGQNDAKFWFENKEKRLELSKLFPYAELENIKEIKELIPKKGEELICEKDDRIKRSFEVKKSINQQIANQNIVKYKIIDGEYYLVQQINNIYEEKSNDIFYKLFDESKKDKILLCELEDPKLYNRLREIFYAHEKSKINPFLEYCLFEHGIETTPNNFNYLIHGIKKSPNKPNSPIVKKLRYLERKTNPYIFKKADLNRKRNNFGEFVIPKLKDKTINGLDSLSQYCVEVYYDSDAQRFIFLPIYMVSVDINSKKINREERYYKETVARLIGKKTPLYITTLYTGNWCKVVKRDSSFSQGRFIYYHKTHNKLVFGKDGSYSSSDAFYMTTNDKQIIIYGLDILGKKYKILDSNDII

SEQ ID NO: 1246 - protein, 669 aa, synthetic construct
  REGION 1..669: note = MG87-100 effector
QYQFNYMQLMKELDYEKEAKEYFEKNYTNRTVEPYLVEKKYIDVLIANPQVKKTLRKAISVINAIIKRYKEYPTVIAIESTREMNSKAKKDAIIKEQAKLEKLRKDAITFLEENDLRVNETNILKAMCYKETNGHCMYCNTPIPASQLSTLEIEHILPISQSYDDSFDNITCACLKCNMEKLKKTPYEFLMSINSYEPFKERVIDLPISDKKKNNLLFEGDISKYELKFINRNLRDTAYGSMALAEELRKFNVFLERKANRYINIVTIPGQMTSKMRRKYELEEKDRTQLYHHAVDATIVASIANTPVGRLIIKGQNDAKFWFENKEKRLELSKLFPYAELENIKEIKELIPKKGEELICEKDDRIKRSFEVKKSINQQIANQNIVKYKIIDGEYYLVQQINNIYEEKSNDIFYKLFDESKKDKILLCELEDPKLYNRLREIFYAHEKSKINPFLEYCLFEHGIETTPNNFNYLIHGIKKSPNKPNSPIVKKLRYLERKTNPYIFKKADLNRKRNNFGEFVIPKLKDKTINGLDSLSQYCVEVYYDSDAQRFIFLPIYMVSVDINSKKINREERYYKETVARLIGKKTPLYITTLYTGNWCKVVKRDSSFSQGRFICYHKTHNKLVFGKDGSYSSSDAFYMTTNDKQIIIYGLDILGKKYKILDSNDII

SEQ ID NO: 1247 - protein, 1094 aa, synthetic construct
  REGION 1..1094: note = MG87-101 effector
MAEKINKNENISIGIDLGVADIGWSVIDLAKKEVIDRGVSFFSQAEKAVDRRNFRNIRRRIKRKNHRIERLYKLFQANNIYYENTIDSKLLEKRIRAIKSGEKLEMQDIINIIIYFARHRGYIPFGDEERVNEFVTELRDKGYMPCEIQKELLNTYGQYRGAAYTITHKDYIQELKTLFGNQKRYYPQVLTDNFLNDVIQILDSKRQFWEGPGAPRLNALTKYGRYKVKEDIEKYELDNNYNKYLYENLVGNCKIYIGEKKVNSSNFYAEYFNFYNDLTNLKFSVDEMNNENLSYFEKIDNTTYKLKTFAIEELKEEILNSVKQIKPLIRKKFKVNVIIGEKTVGSESISTFKTYRSIKKVINNEQLFEELTENIDVYNTAIEIINISPDENTRFDMLETKLPHLSYELLNILKTKEIKSKIENKYQNFSEKAIKKYLSLMKQYNKNSSYIERTYPHEINADTEQYKIEHYINQNIEAGELKYISTNFIDDLVASPQTKKSLRKAITVLNKLFRKYGYPAYICIEATTNILSNDQKKEYEKATLENFRTREEARKKLVDLGYDCTDNNINKYLLLKEMDFKCAYCNAPISLNNCEIEHILPKSITGDDSFSNKTISCYDCNHNKGQRTPLAYLTSINQYEEFEKRIKANKNISNAKKGYLLFTGELIKYEKRFKNRNLNDTAYATNELANQLKLFLKAYENNNEEQLDLKIIKIPGKLTAIIRNRNGVEKDRDKGFHHAVDAGVIASIILLPIGRLMALIQNNPDKYWLSNIVSENRDQLFDMLNLPSKIRDSLKEASFENTRCSMEVKKNPQGKLYDANVQKVIKNKKDNQYYKISEIPNIYVNTSSENNSADNNEIKKTIDNIKKVFHDNTKELLCKKNDPHLYNKLHDILEKYSSGGINPFVAYCLENNVAEGEVFNYNIHGIRRDDKTSSPIVKKLRYLKKVTTPFLLEKKSINKKENTFLMYDSLQQYCSRVFKHKETGKLYIMPIYKVCVDFKTKKVLQDSKYYKTLYNEFIGVDRNELDFYMDLFNNEYIRFVNNDATVHEGFVGDFHKNNAKIIVKNCISITQKKTIEIKKINMDILGLYNLNVPK

SEQ ID NO: 1248 - protein, 1151 aa, synthetic construct
  REGION 1..1151: note = MG88-21 effector
MKYRLGLDMGATSIGWAVYDIDSQTMVDMGVRIFDDGREDKTKASLCVKRRMARSARRLQSRKHIQKQYLLNTLLKLGLFPQSEEERQKLKLWNPYELRAKALDEKLSLFEIGRILFHLVQRKGFLSGRKDNKEEGGKLKEGYRHLKEQIAASNARTYGEYLYFRLQNKEGTRLKNTFDANGKFTGTDFPFRELYKEEFNKLFTKQSEFYPDILTNDTRNQLEDILFFQRPLREADEGFCSFEIGEKRIPKAHPLFQEFRIRQRVSDLTFSPETSSEYDPLPKEQQERLVDILKHPADYIKTKQHILTYANIKSLLGLDKKGVFNFEDRSDKENSKGILVDTTEHAIALIPTVYQEWQQLSNEQKEHVICILARPSTYIDFPQKQSSEQQDNIIINHLCEQFSLSFDAAKALLYDVNLEDGFGSLSEKALRKIVPAMKSGMAYDMACTEVGYHHSQKEYTYLDELPYYGEILTQSCIGQKNDLQLTEKQSPEEKYGKIANATVHVALNQVRHIVNELIHRYGKPFDISIEYARDLPASASERKKLSQIRNDNEKENQRIIEELNKQIPNKKWTKPDIEKYKIWKNLGTPKGVKALDCRECPYTGEKISVSDLMNGYRFQIEHIIPYSCSFDDSIHNKVISAAWANKLKGNKTPYEAFHKETGQHPGIVWAEIQQRVKKLPPEQQWRFSKNAMEMFEKRKSPIARSLNDTRYMTRLLQQYLRPIVREDGKKTVQAVAGQLTAMVRKSWGLNLYKNKEEKEAYRSFHNHHAIDAMIVAMINRGQIEEVAFKLKQARNPPLEYFKDDFDKLKDTSIPEKEKYGIRKKIREFIMEREAGVIKQYIPCPTTLHVPDILKRVQNINISHKPKLKYITDFKSTVGQLHEDTAYGLKSFVDDVSLIAYFKTGNNKDKKITEKAITEYIPIFYHPEDKQAYYDAFKNWFIIERKAKTLKAQTAADKQIKKAYADKEQNAVQALRLAAQKAFKWFVGGSNFCAEIYEVSSNNKINGLPTTNAGKWESEIISNYNATIRVHRGEPYYYWKHRYPNARRVMSLKRHDMVQGTFTKEQAYSDDFPKGIQEYTRQIFAKNPLLEQTAILFRVKKISSSGTIFLTPHNIAKEVNDTKSWIASAGSLQKYRAQKVFVSPTGRILHAK

SEQ ID NO: 1249 - protein, 1151 aa, synthetic construct
  REGION 1..1151: note = MG88-22 effector
MKYRLGLDMGATSIGWAVYDIDSQTMVDMGVRIFDDGREDKTKASLCVKRRMARSARRLQSRKHIQKQYLLNTLLKLGLFPQSEEERQKLKLWNPYELRAKALDEKLSLFEIGRILFHLVQRKGFLSGRKDNKEEGGKLKEGYRHLKEQIAASNARTYGEYLYFRLQNKEGTRLKNTFDANGKFTGTDFPFRELYKEEFNKLFTKQSEFYPDILTNDTRNQLEDILFFQRPLREADEGFCSFEIGEKRIPKAHPLFQEFRIRQRVSDLTFSPETSSEYDPLPKEQQERLVDILKHPADYIKTKQHILTYANIKSLLGLDKKGVFNFEDRSDKENSKGILVDTTEHAIALIPTVYQEWQQLSNEQKEHVICILARPSTYIDFPQKQSSEQQDNIIINHLCEQFSLSFDAAKALLYDVNLEDGFGSLSEKALRKIVPAMKSGMAYDMACTEVGYHHSQKEYTYLDELPYYGEILTQSCIGQKNDLQLTEKQSPEEKYGKIANATVHVALNQVRHIVNELIHRYGKPFDISIEYARDLPASASERKKLSQIRNDNEKENQRIIEELNKQIPNKKWTKPDIEKYKIWKNLGTPKGGKALDCRECPYTGEKISVSDLMNGYRFQIEHIIPYSCSFDDSIHNKVISAAWANKLKGNKTPYEAFHKETGQHPGIVWAEIQQRVKKLPPEQQWRFSKNAMEMFEKRKSPIARSLNDTRYMTRLLQQYLRPIVREDGKKTVQAVAGQLTAMVRKSWGLNLYKNKEEKEAYRSFHNHHAIDAMIVAMINRGQIEEVAFKLKQARNPPLEYFKDDFDKLKDTSIPEKEKYGIRKKIREFIMEREAGVIKQYIPCPTTLHVPDILKRVQNINISHKPKLKYITDFKSTVGQLHEDTAYGLKSFVDDVSLIAYFKTGNNKDKKITEKAITEYIPIFYHPEDKQAYYDAFKNWFIIERKAKTLKAQTAADKQIKKAYADKEQNAVQALRLAAQKAFKWFVGGSNFCAEIYEVSSNNKINGLPTTNAGKWESEIISNYNATIRVHRGEPYYYWKHRYPNARRVMSLKRHDMVQGTFTKEQAYSDDFPKGIQEYTRQIFAKNPLLEQTAILFRVKKISSSGTIFLTPHNIAKEVNDTKSWIASAGSLQKYRAQKVFVSPTGRILHAK

SEQ ID NO: 1250 - protein, 1099 aa, synthetic construct
  REGION 1..1099: note = MG88-23 effector
MRYKLGLDLGSTSLGWAVAALNEKDEIVDLVDLGVRIFPDGRDAKTHTPINVNRRDARTARRRGDRVKLRKDMTMKLIEKYGLGFQINEKLENPYKLRAAALGRKLSPDELGRVLFHLALRRGFKSNRKETRGEDGGKLKQATLALQTSIGDKTLGQWQNETGKYRFSNQFDGDKIKDGAFYPTRKMYEDEFKAIFKAQEIDDKTREEFYDAIFFQRPLKPQDVGNCMFEEGEPRAYKFYPAFQKWRALQQLNQLAILENGKNIPLTDEQQNAIRNTLLDTFNYVNKKGKLTFAKIRSQLKIKSKFNLESEKRDSLDADKTGFAMSQIGADDFWRGLKESEQNALLDKINNDQIEDEEIVAELTRANIDQDLAEQIANISLEDGTASVSLKAIDKMLPFLEAGQMYDKAAESAGYHHSNKNVPQYDNLPYYGDLALLRPSLVADKYGRFRVMNATVHIALNQIRAVVNELIGKYGKPAAVNIEMGRDVREGAQGRKEIDIEQAKNKRYNDEIRKELAAIGIANPSREDFQKYKLWEMLAKNPVDRRCVYTGQQISLTDLYTNKFEIEHILPFAQTLDDSIANKTVSAVEANRFKGNRTPFDAFNDPKCPDDWKYEKVWERAQNLPDNAKWRFKETALADYLRDNDCIARALNDTRHMSRLAVWYLQHICKDKNNVAGLPGRMTALFRDMWSLDWWKNKEELEKERYRAHHIHHAIDAFVIACMGRGQLQKLATNADSLERFGKNLKEKRKNLFANIDVPFDGFNHFDFFTTCENTIISYRQSHKNPRADGTIGRLHEDTAYSLVEFTNGTKATFCVSESVPDGKDEKTARKFFSNINKTTLDMFMVDTGVLNDDANMAQKFIEWCNEKGHKKIRMHYKDIDATTYIPIFRNKPDRENYYKAYEELFAEDGVAAGMTDKKAKAAQKAKEHGLLEKYRTAAMRAYKWFVGGNNFCAEIYEIRKDDKKYPKLRGTWQIEVMSNFDAMRARGEPLWRKKYPTAKRIMTLRRDDMVIAEFDRTDEKLPKGIIDAVNAKADWEKRDKVEIIFRVKKLNSSGIVYLRPHFIAKEDADTKSWGASASSLQEHNARKINISPTGKILK

SEQ ID NO: 1251 - protein, 1194 aa, synthetic construct
  REGION 1..1194: note = MG88-24 effector
MSCCYRLGLDLGTSSLGWCCLDISNNEDRKILDMGVRIFPDGRTDKEKTPLCVSRREARSSRTRLRRFKMRQSKLIKDLQNIGLLPADKKLFKELEQVNPYELRAKAVKEKLSLFELGRVIFHLNQRRGFLNNRKEEKDAIKDEKLKSKKETKTQTAMNKLTDLMKAENCQTLGEFMFKTGKKRFKNPVDDKGKLQIEFYPNREMYAEEFEKIWNFQKQYYPNILTDEHKQIIENEDIFYQRNLKKQDAGYCSLEREEKRAPKAYVISQRFRIISELNNLKITYPSEGMLSEEERNKLLDFLDNPKEKFDNSIVKFERILELLNLPIETSFNLMENNREGIKYNETNAILGSDDSFGSQWFEFSQEQQDAIIDILQDYSLDNKEVLEKLKEKCPKLSAEQINNILNNSLFLPDGYSNLSEKAMNKLYDEMFAKYDIAYEKAVENVYGKNIDELMSFEQFDFLPPYQELFPEQLKGGEKTLDKNLFYDDYMGRISNVSVHIALNQLRIIVNELIKKYGKPTEITIELGRDLTKGKKALADIAKRQRENAKIMEEARQAIRQQGVRITPFNIEKYKVWRNINPKNVLKRVDLYTGKTISLTDLFRGSYDIEHILPYSWTYDDSYDNKIITRSDVNRKKLNQLPYDFFTDENQLKSLAKNDEDFADMQLDEIKKRAKDIDKARNNIKRTFNFKAISWRFSEHAREIFNRNNKNMARDLSDMQYMSVLAKKYLTCICPKEKIISAKGILTDLMKNVWNITDTLPHDYELWQVQKWQRDDLIEKKIRQITNENPDMEDSLIQEKAKETVSAMSENEIQKQTSPKKDRSIHYHHALDAFTLANITTSIVQYVSSSKFANEVENFRNEKNENPDSEKQIDMKEAQLRLLKQSGKFYEKPYPSFNKEEFSKQLENIIVSYKNPVDKLKSVMKKSKILHKNMENFSFSSIHKAGAFGFREIVSIKNGDMEIKLAQKKDKKVKYDTKSLSCMIPIFRTKEQKRAFLEKYVEWQKACVRRKFITKEDYLQIEKEFIATFTKDKAFKWHESDGNYAAQIYQINKNDKFVPNRNENWSVEILSNYYAFERKGRFFWKDIYPTAKLIATLRINDIVEATFDKEDQLDKGFTQNKKWVNHQFELNPNVQQLQLLFRVKKMTGGSIYLRPLHVAQEDADKKSWICSVGKFKDYHCHKVCVTATGKVLNGN

SEQ ID NO: 1252 - protein, 943 aa, synthetic construct
  REGION 1..943: note = MG88-25 effector
IWHKQKEYYPQILTDENKEKLKNIIFFQRPLKEAEEGECQFEKGEKRIPRAHPLFQEFRIWQNVLNLTFSAENEPDYKPLEKVQELIKLLMNPQEVKPNKQGIIIYANLKKALGLDKNGVFNFERQNNRDTDLEKGLLVNTTQNAINESEFLAPYWNNFSDAQKGELINVIMRPHNYIPFPKTRISIEEEDDLIINYVRKRFNLPQEAAEELLFDIDLEDDFGSLSEKAISKILPFMKQGTPYHDACQSAGYHHSYKEYEHIDKLPYYGEILGQSCLGKKNNPKCVEEEFGKINNATVHVALNQIRHLINEIIMRYGKPYDIAVEYARDLNASTQERLAMTDTRDKNELENQRIIKELQSKLGNHPYSKNDIQKYKIWKKLPFYDKNPLIRECPFSGEQIPLSELLNGQKFQIEHLIPFSRSLDDSLNNKVIATVEANRYKGNRTPFEAFGQSKDGYNWKDIQHRAKKLSVEQQWRFAPDAMQRFEKQEGPIVRSLIDTRYMTRLLQDYLQPIVKEDGKQRVQAVVGQLTSLVRKAWGLNVYKEKADKDKYREFHNHHAIDAIVISAINRAQIKDVVGILAHVRDDIREEYKDELFQLSDNNVPEDKKREIKKEIRDVTAKREIAIAKKYFPLPKSFNIPDILQQVAAINISHKPNLKNIKQKDSTIGQLHQDTAYGLQKFVDDKSLKAIFKTKKAGDEASDDKTTPKDITQYIPMFRNKEDKKAYYDAFREWFKFNGKAASMDAKTKEDKKLKAEIAQKEQAAIQTLRQTALKAFKWFVGGNNFCAEIYEINPNNKIEGVASKDRGEWKTEIVSNYNATVRNSRGEDIAYWRYKYPNAKRIMSLRGNDMVMATFSREQAFDEKFPKGIQEYVREKFQQKSDCQELDILFRVKKMGSNGICFTPHNIAKENADTKSWIASAGAMQKYRVRKIHISYMGRIQNA

SEQ ID NO: 1253 - protein, 1108 aa, synthetic construct
  REGION 1..1108: note = MG88-26 effector
MKYKLGLDLGSTSLGWAAVKLNDAGAVEQLLDFGVRIFPDGRDAKTHAPINVVRRAARTMRRRGDRVKLRKKRVLQLIRKYGLDFDIRSNPILENPYELRVRALEHRLSPSELGRVLFHLALRRGFKSNRKETKGENGGKLKAATDALASAVGDGTLAQFQVQTKKFRFSNQFDGNVIKDGALYPTRDMYLDEFHRICDAQGLDKEMRAAFENAIFFQRPLIPPVVGTCIFAAGQPRAHKFEPVFQRWRALQQLNQLAILDNGQNVALTDQQRQCLVDILLYNFNGVKRDRGGRVKITFAEIKKQLGLSRTVKFNLESEQRKELNVDSTGFSFAEIGELDFWRSLTDEQQSDVLNKINDDQTEDAELIEYLVAHYGLSASRARAIIDIPLEDDVANVSVVAMKKMLPFLEGGQLYHLAVHSAGYHYGEQDVPLMDKLPYYGDLDVLKPSLMPARDGAYRTMNATVHIAMNQIRVVVNDLIERYGRPCAINIELGRDVRAGAKERAELDKQQSANKRKNDAIRAELAEIGILNPSREDFQKYKLWENLAPQPQNRRCVYTGEPITSLAALFKSGRFEIEHILPFAQTLDDSLANKTISAVAANRFKGNRSPAEAFDDPASPWAYADVWARAQNLPDGSRWRFDRDAMEKFTRHGDCIARALNDTRFMSVMAVNYLKHICSDKNKVRGLPGRLTAIFRDMWHLDWWKNHDDADTYRASHIHHAIDAFVIACMGAGNLQKLAENATHLEDFHGKTLKEKHRQLFADMYLPFPEFDYYDFRMRCEACVISYRPSVKEPAASDTVGCLHEDTAYKLEKFETGTRATMSRRIALPTTADARAKFKKDFDSLNPKTLEMFLAETGVANDANDIADQFLNWCQMRGIKKVRMFKTRVDTTTYVPVFRNRGDKNAFNRAWTEWYAAAGIARGMTEPKAKKAQQEKERRLLALYQNAAARAYKWFVSGNNFCADIFEIRSDDRRYPALAGQWQSEIISNYCATLNNGTPMWRCKYATARRVMRLRINDMVMAEFSRDNVPLLKGLEDAVRHQLAVQDTDTVNIIFRVKKISSNGAIFLRPHYIAKEDADTKTWQANATSLQKYKARKIRVSPTGKVLE

SEQ ID NO: 1254 - protein, 1194 aa, synthetic construct
  REGION 1..1194: note = MG88-27 effector
MSCRYRLGLDLGTSSLGWCCLDISNNEDRKILDMGVRIFPDGRTDKEKTPLCVSRREARGSRTRLRRFKMRQSKLIEDLQKIGLLPVDKNLFKDLEQANPYELRARAVKEKLSLFELGRVIFHLNQRRGFLNNRKEEKDAIKDEKLQSKKETKTQTAMNRLTDLMKSENCKTLGEFMFKTGKKRFKNPVDDNGKLQIDFYPNREMYIDEFEKIWNFQKQYYPNILTDEHKQIIENEDIFYQRNLKKQDAGYCSLERDEKRAPKAYVISQRFRIISELNNLKITYPSEGMLSEEERNKLLDFLDNPKEKFDNGIVKFERILELLNLPIETSFNLMKNNREGIKYNETNAILGSDDSFGSQWFEFSQEQQDAIIDILQDYSLDDKEVLEKLKEICPKLSAEQINNILNNSLFLPDGYSNLSEKAMNKLYDEMFAKYDIAYEKAIENVYGKNIDELMSFEQFDFLPPYQELFPEQLKGGDKTLDKNLFYDDYMGRISNVSVHIALNQLRIIVNELIKKYGKPTEITIELGRDLTKGKKALADIAKRQRENAKIMDEARHAIRQQGVRITPFNIEKYKVWRNINPKNVLKRVDLYTGKTISLTDLFHGSYDIEHILPYSWTYDDSYDNKIITRSDVNRKKLNQLPYDFFTDENQLKSLAKNDEDFANMQLMEIKKRAKDIDKARGNIKKTFNFKAISWRFSEHAREIFNRNNKNMARDLGDMQYMSVLAKKYLTCICPKEKIISAKGILTDLMKNVWNITDTLPHDYELWQVQKWQRDDLIEKKVRQITNENPDMEDSLIQEKAKETVSAMSENEIQKQTSPKKDRSIHYHHALDAFTLANITTSIVQYVSSSKFANEVENFKNEKNENPDGEKQIDMKEAQLRLLKQSGKFYEKPYPSFNKEEFSKQLENIIVSYKNPVDKLKSVMKKSKILHKNMENFSFSSIHKAGAFGFREIVSIKNGDMEIKFAQKKDKKVKYDTKSLSCMIPIFRTKEQKRAFLEKYVEWQKACVRRKFITKEDYLQIEKEFIATFTKDKAFKWHESDGNYAAQIYQINKNDKFVPNRNENWSVEILSNYYAFERKGRFFWKDIYPTAKLITTLRINDIVEATFDKEDQLDKGFTQNKKWVNHQFELNPNVQQLQLLFRVKKMTGGSIYLRPLHVAQEDADKKSWICSVGKFKDYHCHKVAVTATGKVLNGN

SEQ ID NO: 1255 - protein, 560 aa, synthetic construct
  REGION 1..560: note = MG88-28 effector
TEIDHILPFSRTFDDSLNNKIICFAQANRDKGNRTPYEAFGPKNNDLLYSWNDILKHISGLNKERHWRFSEGAMKHFMKLENPVSRLLNDTRYMTRILQQYLRPIVDPNGYKTVQAIPGKLTAMVRKVWGLNDYKEKSNVKKYRIEHYHHAIDAIVIAAVNRMHINNISRELNREALNIKEEARRIFKEELWKLWPENKEKISGEDISDLKRRIKDFVIGKTHELIKRLVKKPDNLDVTAIKDLVSKINISHKTSLKNIQDKRSTVGELHQDTAYGLRSLSNQSLRGQFQTTKEGKQESKTIDITTYVPIFRNKTDRDAYFDAYREWFIAKGKSKLVRAKSKEEKLLKGSLKNIEICAEQKLRDFAKRAFKWFVSGNSYCMTIYEINQNNKIKGMSSKNRGEWEGEVVSNYNATLRVRRGESVSYLPYRWPTSKKVMELHRNDMVLATFTREEINALSDDDRVIENGAVIDKGTTISTFAPGLRSYLKRNLANAPEHQSEIKILFRVKKMAADGKIHFIPHDIAKELSQDDTSWGTSVSNLQDHNVRKVYISPAGKMKYA

SEQ ID NO: 1256 - protein, 820 aa, synthetic construct
  REGION 1..820: note = MG88-29 effector
DLQNQIIDILQDYSLQDGEAETKLKELNLGFSQSQLDNALEYSLFLPDGYTNLSAKAMRKLLEDMKLCGSDYATAVENVYHQTAADVGFFEKRDELPPYQELFTESLIGGDKELYDKELDYDNYMGRITNVSVHIALNQLRAVVNELIKKYGKPSGITIELGRELTKGKKALAEIDKKQKESAKIMEEARAEIRKAGATVTSFNIEKYKVWHNLNEDITKRIDLYTGKNISVSQLFSNEYEIEHILPYSWTYDDSYNNKIITRANINRQKSNQLPYVFFSDERQLKAVAKDDEELKEMSIDNVIRRAKEIDKSRKNIKKTFNFNALTWRFSKNARDIFNRNNKNMARDLTDMQYMSKLAKKYLTCICPPNKIVSAKGQMTDLLKAIWELSDVSPEDYRLWTPQEWQKRDITEWKKKQFILTNPEWNADEAEKEAKKFVQGLTDEEIHNMTHVGKNRTVHYHHALDAFVLANITTKVMQEMSTEAFANAVEEYAEAHNVTIREAQKSLLTQSSDISYKPYSTFDKKDLADKLRDIVVSYKNPIDKLKSIINKAEITGQNLAHFSFAPICEDTAFGLKKIIKISKNDIDIEFSVRKDGKKKAETHKLSTMVPVFRTKEQKQAFLDLYVQWQRAVMRQKFIGKGKYEEIEKAFIETFTRDKAFKWFASAGNYGAQIYQIQKNDKFAPNKNEDWSLEILPNYYAFERKGKFFWKDIYPTAKLITTLKINDVIEATFERNDNLESGFSKIRNWVKEQFENHPDKKQLRLLFRVKKMSGGSIFLRPLHIAQEDNGDVKSWQCTIGKFKQYQCRKVCITPTGKVLRG

SEQ ID NO: 1257 - protein, 585 aa, synthetic construct
  REGION 1..585: note = MG88-30 effector
MGNINKRICPYTGKQISIKNLFDASTEIDHILPFSRTFDDSLNNKIICFAQANRDKGNRTPYEAFGPKNNDLSYSWNDILKHISGLNKERHWRFSEGAMKHFMKLEYPVSRLLNDTRYMTRILQQYLRPIVDPNGYKTVQAIPGKLTAMVRKVWGLNDYKEKSNVKKYRIEHYHHAIDAIVIAAVNRMHINNISRELNREALNIKEEARRIFKEELWKLWPENKEKISGEDISDLKRRIKDFVIGKTHELIKRLVKKPDNLDVTAVKDLVSKINISHKTSLKNIQDKRSTVGELHQDTAYGLRSLSNQSLRGQFQTTKEGKQESKTIDITTYVPIFRNKTDRNAYFDAYREWFIAKGKSKLVRAKSKEEELLKGSLKNIEICAEQKLRDFAKRAFKWFVSGNSYCMTIYEINQNNKIKGMSSKNRGEWEGEVVSNYNATLRVRRGESVSYLPYRWPTSKKVMELHRNDMVLATFTREEINALSDDDRVIENGAVIDKGTTISTFAPGLRSYLKRNLANAPEHQSEIKILFRVKKMAADGKIHFIPHDIAKELSQDDTSWGTSVSNLQDHNVRKVYISPAGKMKYA

SEQ ID NO: 1258 - protein, 731 aa, synthetic construct
  REGION 1..731: note = MG88-31 effector
EEKDPTKYQITNISVHVALNQLRLVVNELIKKYGNPDCVAVEVARDLKMGTNELSKVNKQQEKNKKENERIIAEIQKEAEIQNPSIEDIQKYKMWEMLSNDDTKRCCVYSGKQISIHDLFSSQVQIEHILPYSRTFDDSIFNKTLSYREANAHKGNRTPYEAFGDSKDGYNWDGIMDRIKNLPKATQWRFNKNAMSKVKEYLEKFGLNDMIARQLNDTRYMSRLAVQYLKHICKAEYYTDENGKEHRENNCYGLPGSQTALFREQWGLNDWKDKENDEKYRASHIHHGIDAFVVACMTRSQLQTIARNATKDEEEAYKQYKEAKARGEEISKGKCLKEKRKSWFKDIEKPFEGFDRAKFNEICDKMPISFKPKLKNPEQENSTVGALHKDTAYSLLEFDKGLNGVFVKREELSQFDEKKKKQNEDENNEDDTGDTQEKTNENGKKKDNKKKKIDFIKSVIDTYAEKLINEYGETEEAFNKFKEYCETNGIKKIRCKSFADVSTYIPVFRTKQERDEYHKAYEEWFVFEGLSPENETKEQKEERLKKEQELLKNVREKASKAYKWFVGGNNFCADVYQINPKDKLYTKERCKWKVEVLSNYMATLNKGQALWKKKHPTARLVMRLKIDDMVMGEFSKDDEKLPTGIKDLVLHRCQKHKTDKVEILFRVKKMRSTGVVYIRPDFITKEEGDKKSVQLSASAYQKYKIRKVFVSPAGKLVDNGFSDKWNDTKCD

SEQ ID NO: 1259 - protein, 1132 aa, synthetic construct; identical to SEQ ID NO: 532
  REGION 1..1132: note = MG89-68 effector

SEQ ID NO: 1260 - protein, 1129 aa, synthetic construct
  REGION 1..1129: note = MG89-69 effector
MSYVLGLDLGIASVGWSIVEPGNRIIDLGVRVFKKAETDKEGDPLNLIRRESRLSRRRLYRKAHRLSRLLNFLISSGLIHSKDEVLKNVYNENPWALRTLGLNSVLTNNQLARVIYHICKHRGFYWASSADDGQADNGKIKKSLSSNQLVMKEKGYKTVGQMIFTEYPNCQRNKSGEYSKSLPRTDLDKELRAIFKAQQSFSNPIVTKDFINAIVGCGDRKTGFLWEQRPALQGEDLLKMVGHCRFEKDELRAPAANFYSEQLVWLTKINNLRVYDEDSQERPLTREERDLILNMPLEMKSDIKYSSLTSAFEKANLWKSGQFKYKSVDYEQKTQKKKNTAKSVDITKSSKKNPEDKVFYKSSHLHEIRKALGSSLSEEWEKIRTEVLSGKYDRYNRIAYVLTVYKEDSDVIEQLSPYESRTLIEALLPVRFSGFVALSEKSLKKIIPHMVLGKRYDEACSEANYKHYKQNQAEFKKLKYLPPLFSGREPNGTLIFNEEIGDIPRNPVVLRVINQTRKVVNAIVKKYGSPKSVHIELARDLAKSRAERNEIKKRNEEAASSRIKERDEFEKLFGSKCLNGTNLLKYRLYKEQDCKSMYSGKEIDHKRLFEKGYVQIDHILPYSRSYDDSQSNKVLVLTNENQDKGNRIPFEYFEAKQHGFSWYEFEQWVKSCKNLNQKKKRNLLRCSLSKDAKKDFLERNLNDTRYACRFVKNYIDSFLCLSENSDNSGCVVVAGQLTAYLRNCWGLNKVREENYRHHALDATVIACCTRKIVQKVGAWSKSREMNSYNSSYVDPDSPVDEDEKLLQKLYVNTRKPDFPKPWECFRSEVESRVFESALEKLKEKLKLQCSYTESELKNVRTLFVSRACEKIGKGALHGDTVYRQTSEMRKENVAVKKVSLKKLKYARIGAIVDADTRNKNLCDALKKRYEEYARKIGKKIEDFVDKDIAKIFADDNPLHMPNSDGQEDPCNPIVKSVRVKEAFSGVPIRNGVAGNSTIIRVDLFKKDGKYYCIPVYAWNKTLPNRAYVSGKKETDWALVDDSFEWCFSIRQNELLKIKLKGETIFGYYNGFDRDRGSFNILLHDRQDGKDHKQGLIRKGIKTAISITKYDVDVLGNYYLSKPEKRLELA

SEQ ID NO: 1261 - protein, 1127 aa, synthetic construct; identical to SEQ ID NO: 489
  REGION 1..1127: note = MG89-70 effector

SEQ ID NO: 1262 - protein, 1127 aa, synthetic construct
  REGION 1..1127: note = MG89-71 effector
MSYVLGLDLGIASVGWSIVEPGKRIIDLGVRVFKKAETDKEGDPLNLIRRESRLSRRRLYRRAHRLNRLLNFLISSGLIHSKDEVLKNVYNENPWALRTLGLNSVLTNNQLARVIYHICKHRGFYWASSADDGQADNGKIKKSLSSNQLIMKEKGYKTVGQMIFTEYPNCQRNKSGEYSKSLPRTDLDKELRAIFKAQQSFSNPIVTKDFINAIVGIGDRKTGFLWEQRPALQGEDLLKMVGHCRFEKDELRAPAANFYSEQLVWLTKINNLRVYDEDSQERPLTREERDLILNMPLEMKSDIKYSSLTSAFEKANLWKAGQFKYKSVDYEQKTQKKKKSAEPSDITKSSKKNPEDKVFYKSSHLHKIRKALGSSLSEEWEKIRTEVLSGKYERYNRIAYVLTVYKEDSDVIKQLSPYESRTLIEALLPVRFSGFVALSEKSLKKIIPHMFLGKRYDEACSEAHYKQNQSEGKKSKYLPHLFSGREPNGTLIFNEEIGDIPRNPVVLRVINQTRKVVNAIVKKYGSPESVHIELARDLAKSRAERNEIKKRNEEAASRRIKEREEFEKHYGAEKTNGTNLLKYRLYKEQDCKSMYSGKEIDHKRLFEKGYVQIDHILPYSRSYDDSQSNKVLVLTNENQDKGNRIPFEYFETKQQGFSWYEFEQWVKSCKNINQKKKRNLLRRSLSNDAKKDFLERNLNDTRYACRFVKNYIDRFLCLSENSDNSGCVVVAGQLTAYLRNCWGLNKVREENDRHHALDATVIACCTRKIVQKVGVWSKSREMNSYNSSYVDPDLPVDEDEMLLQKLYVNKRKPDFPKPWNCFRNEVESRVFESDLEKLKEELKQQCSYTESDLKNVRTLFVSRACEKIGKGALHGDTVYRQTSEMRKENVAVKKVSLKKLKYARIGAIVDADTRNKNLCDALKKRYEEYSSITGKDVSKIDKKDLSKIFSDEKPMHMPNSEGQEDPCNPIVKSVRVKEACSGVPIRNGVAENSTIVRVDIFKKKGQYYFVPIYSWNKSLPNRACQGKNKSDWVVVDDSYEWCFSVRTNDLLKIVIKGKTYFDYYITLDVHSDGRIRLLNHDRQEDDVHYEKGEFRILIKNADSINKYNVDVLGNYYLAKPEKRLELA

SEQ ID NO: 1263 - protein, 1139 aa, synthetic construct
  REGION 1..1139: note = MG89-72 effector
YYIDSILVMNMSYVLGLDLGIASVGWSIVEPGNRIIDLGVRVFKKAETDKEGDPLNLIRRESRLSRRRLYRRAHRLSRLLNFLISSGLIHSKDEVLKNVYNENPWALRTLGLNSVLTNNQLARVIYHICKHRGFYWASSADDGQADNGKIKKSLSSNQLVMKEKGYKTVGQMIFTEYPNCQRNKSGEYSKSLPRTDLDKELRAIFKAQQSFSNPIVTKDFINAIVGCGDRKSGFLWEQRPALQGEDLLKMVGHCRFEKDELRAPAANFYSEQLVWLTKINNLRVYDEDSQERPLTREERDLILNMPLEMKSDIKYSSLTSAFEKANLWKSGQFKYKSVDYEQKTQKKKNTAKSADITKSSKKNPEDKVFYKSSHLHEIRKALGSSLSEEWEKIRTEVLSGKYDRYNRIAYVLTVYKEDSDVIEQLSPYESRTLIEALLPVRFSGFVALSEKSLKKIIPHMVLGKRYDEACSEANYKHYKQNQAEFKKLKYLPPLFSGREPNGTLIFNEEIGDIPRNPVVLRVINQTRKVVNAIVKKYGSPKSVHIELARDLAKSRAERNEIEKRNEEAASRHIKERDEFEKLFGSKCLNGTNLLKYRLYKEQDCKSMYSGKEIDHKRLFEKGYVQIDHILPYSRSYDDSQSNKVLVLTNENQDKGNRIPFEYFEAKQHGFSWYEFEQWVKSCKNLNQKKKRNLLRCSLSKDAKKDFLERNLNDTRYACRFVKNYIDSFLCLSENSDNSGCVVVAGQLTAYLRNCWGLNKVREENDRHHALDATVIACCTRKIVQKVGAWSKSREMNSYNSSYVDPDSPVDEDEKLLQKLYVNTRKPDFPKPWECFRSEVESRVFESALEKLKEKLKLQCSYTESELKNVRTLFVSRACEKIGKGALHGDTVYRQTSEMRKENVAVKKVSLKKLKYARIGAIVDADTRNKNLCDALKKRYEEYARKIGKKIEDFVDKDIAKIFADDNPLHMPNSDGQEDPCNPIVKSVRVKEAFSGVPIRNGVAGNSTIIRVDLFKKDGKYYCIPVYAWNKTLPNRAYVSGKKETDWALVDDSFEWCFSIRQNELLKIKLKGETIFGYYNGFDRDRGSFNILLHDRQDGKDHKQGLIRKGIKTAISITKYDVDVLGNYYLSKPEKRLELA

SEQ ID NO: 1264 - protein, 1130 aa, synthetic construct; identical to SEQ ID NO: 511
  REGION 1..1130: note = MG89-73 effector

SEQ ID NO: 1265 - protein, 604 aa, synthetic construct; identical to SEQ ID NO: 487
  REGION 1..604: note = MG89-74 effector

SEQ ID NO: 1266 - protein, 913 aa, synthetic construct; identical to SEQ ID NO: 490
  REGION 1..913: note = MG89-75 effector

SEQ ID NO: 1267 - protein, 1127 aa, synthetic construct; identical to SEQ ID NO: 513
  REGION 1..1127: note = MG89-76 effector

SEQ ID NO: 1268 - protein, 1131 aa, synthetic construct; identical to SEQ ID NO: 536
  REGION 1..1131: note = MG89-77 effector

SEQ ID NO: 1269 - protein, 1127 aa, synthetic construct; identical to SEQ ID NO: 523
  REGION 1..1127: note = MG89-78 effector

SEQ ID NO: 1270 - protein, 1130 aa, synthetic construct; identical to SEQ ID NO: 506
  REGION 1..1130: note = MG89-79 effector

SEQ ID NO: 1271 - protein, 887 aa, synthetic construct
  REGION 1..887: note = MG89-80 effector
MIQNCSLPYSDHLRNFQQQLVWLTRINNLRVYDENSQERPLTKEEHDLILNMPLEMKSDIKYSSLTSAFVKANLWKPGQFKYKSVDYEQKTQKKKKSAEPSDITKSSKKNPEDKVFYKCSHLHEIRKVLGSSLSAEWDKIRTEVLAGKYERYNRIAYVLTVYKEDSDVIEHLSLYESRTLIEALLPVRFNGFVSLSEKSLKKIIPYMVLGKRYDEACSEAGYKHYKQNQAKVKKSKYLPSLFSGREPNGTLIFNEDLGDIPRNPVVLRVINQTRKVVNAIVKKYGSPESVHIELARDLAKSRAERNEIKKRNEEVASRRIKEREEFEKHYGAEKTNGTNLLKYRLYKEQDCKSMYSGKEIDHKRLFEKGYVQIDHILPYSRSYDDSQSNKVLVLTNENQDKGNRIPYEYFESKQTDISWYEFEQWVKSCKNLNQKKKRNLLRNSLSKDAKKDFLERNLNDTRYACRFMKNYIDRFLCLSENSDKSGCVVVAGQLTANLRNCWGLNKVREENDRHHALDATVIACCTRKIVQKVGAWSKAREVEFNNSSYDDPDLPIDENELLLLNTFKNVKEPKFTEPWHCFREEVEARVFECDLEKLKKELKQQCSYTESDLKNVRTLFVSRACEKIGKGALHKDTVYRQTSEMRKENLAIKKVSLKKLKYAKISSIVDADTRNKNLCDALRKRYEEYSSTTGKDVSKIEEKDLAKIFSDDKPMHMPNSEGQEDPCNPIVKSVRVKDACSGVPIRNGVAENDNIMRVDIFKKRGKYYCIPIYAWNKTLPNKACVARKNESDWVEIDDSYEWCFSVRTNDLIRIDGKKESFFGYFNGFHRSVASFSILFHDRQISKKYKKGEKEGIGVKTAYSLTKYNVDVLGYYYLAKPEKRLELA

SEQ ID NO: 1272 - protein, 1130 aa, synthetic construct; identical to SEQ ID NO: 534
  REGION 1..1130: note = MG89-81 effector

SEQ ID NO: 1273 - protein, 1132 aa, synthetic construct; identical to SEQ ID NO: 507
  REGION 1..1132: note = MG89-82 effector

SEQ ID NO: 1274 - protein, 1132 aa, synthetic construct; identical to SEQ ID NO: 500
  REGION 1..1132: note = MG89-83 effector

SEQ ID NO: 1275 - protein, 787 aa, synthetic construct
  REGION 1..787: note = MG89-84 effector
SVDITKSSKKNPEDKVFYKSSHLHEIRKALGSSLSEEWEKIRTEVLSGKYDRYNRIAYVLTVYKEDSDVIEQLSPYESRTLIEALLPVRFSGFVALSEKSLKKIIPHMVLGKRYDEACSEANYKHYKQNQAEFKKLKYLPPLFSGREPNGTLIFNEEIGDIPRNPVVLRVINQTRKVVNAIVKKYGSPKSVHIELARDLAKSRAERNEIEKRNEEAASRRIKERDEFEKLFGSKCLNGTNLLKYRLYKEQDCKSMYSGKEIDHKRLFEKGYVQIDHILPYSRSYDDSQSNKVLVLTNENQDKGNRIPFEYFEAKQHGFSWYEFEQRVKSCKNLNQKKKRNLLRCSLSKDAKKDFLERNLNDTRYACRFVKNYIDSFLCLSENSDNSGCVVVAGQLTAYLRNCWGLNKVREENYRHHALDATVIACCTRKIVQKVGAWSKSREMNSYNSSYVDPDSPVDEDEKLLQKLYVNTRKPDFPKPWECFRSEVESRVFESALEKLKEKLKLQCSYTESELKNVRTLFVSRACEKIGKGALHGDTVYRQTSEMRKENVAVKKVSLKKLKYARIGAIVDADTRNKNLCDALKKRYEEYARKIGKKIEDFVDKDIAKIFADDNPLHMPNSDGQEDPCNPIVKSVRVKEAFSGVPIRNGVAGNSTIIRVDLFKKDGKYYCIPVYAWNKTLPNRAYVSGKKETDWALVDDSFEWCFSIRQNELLKIKLKGETIFGYYNGFDRDRGSFNILLHDRQDGKDHKQGLIRKGIKTAISITKYDVDVLGNYYLSKPEKRLELA

SEQ ID NO: 1276 - protein, 1130 aa, synthetic construct
  REGION 1..1130: note = MG89-85 effector
MSYVLGLDLGIASVGWSIVEPGKRIIDLGVRVFKKAETDKEGDPLNLIRRESRLSRRRLYRRAHRLNRLLNFLISSGLIHSKDEVLKNVYNENPWALRTLGLNSVLTNNQLARVIYHICKHRGFYWASSADDGQADNGKIKKSLSSNQLIMKEKGYKTVGQMIFTEYPNCQRNKSGEYSKSLPRTDLDKELRAIFKAQQSFSNPIVTKDFINAIVGIGDRKTGFLWEQRPALQGEDLLKMVGHCRFEKDELRAPAANFYSEQLVWLTKINNLRVYDEDSQERPLTREERNLILNMPLEMKSDIKYSSLTSAFEKASLWKAGQFKYKSVDYEQKTQKKKKTAKSADITKSSKKNPEDKVFYKSSHLHEIRKALGSSLSEEWEKIRTEVLSGKYDRYNRIAYVLTVYKEDSDVIEQLSPYESRTLIEALLPVRFNGFVSLSEKSLKKIIPYMVLGKRYDEACSEAGYKHYKQNQAKVKKSKYLPSLFSGREPNGTLIFNEEIGDIPRNPVVLRVINQTRKVVNAIVKKYGSPESVHIELARDLAKSRAERNEIEKRNEDAASRRIKEREEFKKHYGAEKTNGTNLLKYRLYKEQDCKSMYSCKTIDINRLFEEGYVQIDHILPYSRSYDDSQSNKVLVLTKENQDKGNRIPYEYFESKQIDISWYEFEQWVKSCKNLNQKKKRNLLRNSLSKDAKKDFLERNLNDTRYACRFMKNYIDRFLCLSENSDKSGCVVVAGQLTANLRNCWGLNKVREENDRHHALDATVIACCTRKIVQKVGAWSKAREVEFNNSSYDDPDLPIDENELLLLNTFKNVKEPKFTEPWHCFREEVEARVFECDLEKLKKELKQQCSYTESDLKNVRTLFVSRACEKIGKGALHKDTVYRQTSEMRKENLAIKKVSLKKLKYAKISSIVDADTRNKNLCDALRKRYEEYSSTTGKDVSKIEEKDLAKIFSDDKPMHMPNSEGQEDPCNPIVKSVRVKDACSGVPIRNGVAENDNIMRVDIFKKRGKYYCIPIYAWNKTLPNKACVARKNESDWVEIDDSYEWCFSVRTNDLIRIDGKKESFFGYFNGFHRSVASFSILFHDRQISKKYKKGEKEGIGVKTAYSLTKYNVDVLGYYYLAKPEKRLELA

SEQ ID NO: 1277 - protein, 142 aa, synthetic construct
  REGION 1..142: note = MG44-1 PI domain
LKLLDMDAKKMLVGDEPRYVIKTNRNKEEKLVIDKEKNVELYGYLKNKLCDKIYSGLSAFATFAKNIENGKEKFIDLTIVEQAKVLIQILMMFKRKDILSDLTLIGGSSHSGKILFNKKIDDVNFEIIHLSPAGLRVIKNKV

SEQ ID NO: 1278 - protein, 168 aa, synthetic construct
  REGION 1..168: note = MG44-2 PI domain
SLVNEKINKDFIKRKTDKGDLSDDEFRRKLFVEQEEEKTRRENDPEQKNKSKILHVTKEKNNELYNLFLDKVTNEKSPYAYLPAYTSFKNTLEKGKEIFYQMDEYDGLRCLLNLIVAFQCNAKTVDASCIGGSKEICRISTTKEITNMHVTFISQSVTGLKEKRIKIN

SEQ ID NO: 1279 - protein, 146 aa, synthetic construct
  REGION 1..146: note = MG44-75, MG44-81, MG44-89, MG44-3 PI domain
ESFERKVKLNDKKVNFVYDEKKSGFSEQDLTNLFSELKSKVENTFFNCLPAVITNVLKNIDLQTYRVKEKDSDERLLTIEQKVHVVVELLKAFQSNGASSDLHDIGESKNSGIVRTTELDFEKYSIINYSVTGFYFIETKLRDLIK

SEQ ID NO: 1280 - protein, 142 aa, synthetic construct
  REGION 1..142: note = MG44-4 PI domain
LKLLDMNKAGTIKEENGEYIIKTNRNKDRKLVINRESNTALYEELKNRLNKPIYQGLSPFTTFRNNLEKGKEKFENLSVLEQSEVLAQILRFFKCDADKSDLTLIGGSGKSGTIVFNKDITLVDFKIISKSPAGLTERIKTV

SEQ ID NO: 1281 - protein, 142 aa, synthetic construct
  REGION 1..142: note = MG44-5 PI domain
LKVAEMDKNQTCDKDAETYLIKTNRFKEVKLEVNKQNNIALYDEFINRLSSGLYGKMGSAISYLTNLQSGREIFINLTTLNQSLALLQTLKFFKCNAEMADLSLIGGASHAGKIYISRDITKAEVVLVHQSPCGLTLREQKI

SEQ ID NO: 1282 - protein, 179 aa, synthetic construct
  REGION 1..179: note = MG44-6 PI domain
SKVIKSLIDKKELQFDGENIVVIQNRFGDKKLVTKEKNLALYKELVKHLNKAIYKKVSIGAIGRRLKDTYDTFKGLDCVKQVETIKGLLDVINGVSGGDLTSVGESKTCGTLTVNKNINVPISIINYSPTGFYEKEIKLNWWDLEPWWLTHIANLNWDLIIWYAKANKFSVCFWMKFPP

SEQ ID NO: 1283 - protein, 154 aa, synthetic construct
  REGION 1..154: note = MG44-9 PI domain
SKVIKSLIDKKELQFDGENIVVIQNRFGDKKLVTKEKNLALYKELVKHLNKAIYKKVSIGAIGRRLKDTYDTFKGLDCVKQVETIKGLLDVINGSNGGNLENVGESKNCGTIKINKNINVPISIINYSPTGFYEKEIKLNWWDLEPWWLTHIAS

SEQ ID NO: 1284 - protein, 140 aa, synthetic construct
  REGION 1..140: note = MG44-10 PI domain
SKIIKNITDKKELQYEGDNIIVVQNRFGEKKLITKEQNLILYKELVKHFNKAIYKNVSIGEIGKKLKDTYTIFYNLDCEKQIETINGLLNVLNGSSGGNLTNVGESKNSGVLVLSKTINIPISIINFSPTGFYKKEIKLN

SEQ ID NO: 1285 - protein, 154 aa, synthetic construct
  REGION 1..154: note = MG44-12 PI domain
SKAIKSLVDKKELQFDGENIVVIQNRFGDKKLVTKEKNLALYKELVKHLNKAIYKNVSIGAIGKRLKDTYDTFKDLDCVKQIETIKGLLDVINGSNGGNLANVGESKNSGALTVNKNINVPISIINYSPTGFYEKEIKLNWWDLEPWWLTHIAS

SEQ ID NO: 1286 - protein, 149 aa, synthetic construct
  REGION 1..149: note = MG44-13 PI domain
SKVIKSLIDKKELQFDGENIVVIQNRFGDKKLVTKEKNLALYKELVKHLNKAIYKNVSITTIAKRLKTTYDTFKGLDCVKQIGTIKGLLDVINGASGGDLTSVGESKTCGKILVSKIIKEQQISIINYSPTGFYEKEIKLNWWDLELWW

SEQ ID NO: 1287 - protein, 143 aa, synthetic construct
  REGION 1..143: note = MG44-14 PI domain
EKYLSMSDSTKEKLAKADDYIVVSPGIKDKTQEVRITRQENIELYDLVIRQLKKKIYNISSIKGVLNTLENSRRKFNLLNLDEQVKQLNNIIRYLGGSYSVDLILLGGVGRAGATTIGKNITDLDVKVIVQSASGLKRKEIKL

SEQ ID NO: 1288 - protein, 142 aa, synthetic construct
  REGION 1..142: note = MG44-15 PI domain
LKLADMKAKGVINVGQEEFVMKTNRGGERKLVIDRANNADLYGMLKRKLERKNYAGLSAFATFRKNLEKGEKKFNSLTVYEQTVVLLQILKFFKCNAETADITLIGGSGRSGVISINKSVTDVDFRLIDLSPAGLTERVRKV

SEQ ID NO: 1289 - protein, 142 aa, synthetic construct
  REGION 1..142: note = MG44-17 PI domain
SKLVEMAKNGTISEENGEYIIKTNRNKDVKLTINRQSNIELYDTLKNKLSKPSYQGLSPFSTFRKNLESGEEKFANLSVVDQCTVLLQILKFFKCNAETADIVLIGGSKISGKILFNKDIAGVNFEIVSKSPAGLTERIKKV

SEQ ID NO: 1290 - protein, 142 aa, synthetic construct
  REGION 1..142: note = MG44-63, MG44-18 PI domain
KKLLDMNKEVKQKPESEEFVMKTNNEGVRKLVITRQSNIEKYDLLAAQLGKDFYQVLSPFRNVKKIIDEGKKKFCELLVIDQCYVLMQILSYLQCKGATADLQLIGGSGRSGQIRFNKDITNVDFRIYDTSSTGLFVKESKA

SEQ ID NO: 1291 - protein, 142 aa, synthetic construct
  REGION 1..142: note = MG44-19 PI domain
LKLADMKTKGVINVGQEEFVMKTNRDGERKLVIDRANNADLYDMLKRKLKRENYAGLSAFATFRKNLEKGEEKFNSLTVYEQTVVLLQILKFFKCNAETADTTLVGGSAKSGKILINNNITNVDFRLIDLSPAGLTERVRKV

SEQ ID NO: 1292 - protein, 142 aa, synthetic construct
  REGION 1..142: note = MG44-21 PI domain
LKIVDMDAKKMLVGDEPRYVTKTNRYKKEKVVIDKEKNLELYCRLKDKLSDKIYSGLSAFSTFAKNMESGEEKFKELAIVEQAKTLIQILKMFKCNAETSDLKFIGGSSRSGTVYINKKIDGVNFEIIHLSPAGLRVIKNKV

SEQ ID NO: 1293 - protein, 142 aa, synthetic construct
  REGION 1..142: note = MG44-23 PI domain
SKLVEMAKNGTISEENGEYIIKTNRNKDVKLTINRQSNIELYDTFKDRLSKPIYQGLSPFSTFRKNLESGEEKFANLSVTDQCTVLLQILKFFKCNADTADISLIGGGETCGRIRFNKDISKVNFEIVCKSPAGLTERIKKV

SEQ ID NO: 1294 - protein, 133 aa, synthetic construct
  REGION 1..133: note = MG44-25 PI domain
VSFLKKLKEDNSYQYSPKFAGFSDSELNELLNILKWKIINTKFKNISDSVTKLLKATQFDENLVLSIPDKAKLVMNLVGFFENRDHFNDLSLIGGKKQMGRLLKSIKPKGDFSIVYQSVTGFYVHEIKLNELK

SEQ ID NO: 1295 - protein, 142 aa, synthetic construct
  REGION 1..142: note = MG44-27 PI domain
SKLVEMAKNGIISEENGEYIIKTNRNKDVKLTINRQSNIELYDTLKDRLSKPIYQGLSPFSTFRKNLESGEEKFANLSVTDQCTVLLQILKFFKCNADTADISLIGGGETCGRIRFNKDISKVNFEIVCKSPAGLTERIKKV

SEQ ID NO: 1296 - protein, 142 aa, synthetic construct
  REGION 1..142: note = MG44-29 PI domain
KKLLDMNKTVKQKTESEEFVMKTNNDGVRKLVITRQSNIEKYEMLVAQLDKDFYQGIPPFRNVKKIIDEGKKKFCELLVIDQCYVLMQILSYLQCKGATADLQLIGGSGRSGQIRFNKDITNVDFRIYDTSPTGLFVKESKA

SEQ ID NO: 1297 - protein, 142 aa, synthetic construct
  REGION 1..142: note = MG44-39, MG44-30 PI domain
SKLVEMAKNGTISEENGEYIIKTNRNKDVKLTINKHSNIELYDTLKNKLSKPSYQGLSPFSTFRKNLEGGEEKFANLSVADQCTVLLQILKFFKCNAETADIVLIGGSGRSGCILFNKDVSKADIKIICKSPAGLTERIKKV

SEQ ID NO: 1298 - protein, 151 aa, synthetic construct
  REGION 1..151: note = MG44-32 PI domain
VKLLEMAKNPMFDVNCEKYELTPNRERGEKITIDRDSNIKLYDFLLKKFDSEGDAKNKINKRFQGISSYLAFGQNLKSGREKFVSLTVLQQVNVLSQVMKFFRCNADTADIELIGGSKGSGKILFNQNITDVDFRIISQSPCGLTVHVKRV

SEQ ID NO: 1299 - protein, 133 aa, synthetic construct
  REGION 1..133: note = MG44-36 PI domain
VSFLKKLNEDNSYQYSPKFAGFSDSELNELLNILKWKITNTKFKNISDKVTSLLEATQFDENLVLSIPDKAKLVMNLVGIFENRDHSNDLSLIGGKKQMGRLLKSIKPNGDFSIVYQSVTGFYVHEIKLNELK

SEQ ID NO: 1300 - protein, 141 aa, synthetic construct
  REGION 1..141: note = MG44-43 PI domain
SKTVKLMNDKKELNIEDGNIVVEQNRFGEKSLLIKEENMKLYKELIKHLNKSIYKCISLGKIGKDLKNTYEIFENVDIVEQVKTIKGLLDIINGVSGGDITNVGGSKNSGLISFSKTLSKNPVSIINSSPTGFYQKEFKLV

SEQ ID NO: 1301 - protein, 142 aa, synthetic construct
  REGION 1..142: note = MG44-44 PI domain
LKLADMKAKSIINVGQEEFVMKTNRDGERKLVIDRANNADLYGMLKRKLERENYAGLSAFATFRKNLEKGEEKFNSLTVYEQTVVLLQILKFFKCNAETADISSIGGGKIVGKIYVNINITNVDFRLIDLSPAGLTERVRKV

SEQ ID NO: 1302 - protein, 136 aa, synthetic construct
  REGION 1..136: note = MG44-46 PI domain
VSFLKKLQEDNSYQYSPKFAGFSDSELNELLNILKWKIINTKFKNISKPVTKLLIKAPQFDENLVLSIPDKAQLVMNLVGIFKNSYSSKGNDFSLIGGKKKMGSLLKSIKPEDDFSIVYKSVTGFYVHEIKLNELK

SEQ ID NO: 1303 - protein, 133 aa, synthetic construct
  REGION 1..133: note = MG44-47 PI domain
VSFLKKLQEDNSYQYSPKFAGFSDSELNELLNILKWKITNTKFKNISEPVTKLLEATQFDENLVLSIPDKAKLVMNLVGIFENRDHTNDLSLIGGKKEMGRLRKSIKPKGDFSIVYQSVTGFYVHEIKLNELK

SEQ ID NO: 1304 - protein, 141 aa, synthetic construct
  REGION 1..141: note = MG44-59, MG44-50 PI domain
SKTVKLMNDKKELNIEDGNIVVEQNRFGEKSLLTKEENMKLYKELIKHLNKSIYKCISLGKIGKDLKNTYEIFENVDIVEQVKTIKGLLDIINGVSGGDITNVGGSKNSGLISFSKTLSKNPVSIINSSPTGFYQKEFKLV

SEQ ID NO: 1305 - protein, 142 aa, synthetic construct
  REGION 1..142: note = MG44-52 PI domain
LKIVEMQSKNMLDLYSDSLVMKTNSAGDEKLVVDKNKNLELYQRLTNKLNEKIYSGISAFSSFKNNLLNGEEKFAELELPEQAKVIIQILKFFKCNAETSDLTSIGGAKGSGSIKFNKNITDVDFRLINRSPAGLTEKVRRV

SEQ ID NO: 1306 - protein, 142 aa, synthetic construct
  REGION 1..142: note = MG44-53 PI domain
LKIVDMDAKKMLVGDEPRYVTKTNRYKKEKVVIDKEKNLELYSRLKDKLSDKIYSGLSAFSTFAKNMESGEEKFKELAIVEQAKTLIQILKMFKCNAETSDLKFIGGSSRSGTVSINKKIDGVKLEIIHLSPAGLRVIKNKV

SEQ ID NO: 1307 - protein, 142 aa, synthetic construct
  REGION 1..142: note = MG44-56 PI domain
SKLIEMSKNGTISEENGEYIIKTNRNKDVKLTINRQSNIELYDTLKNRLSKSSFQGLSSFSTFKSNLTNGEEKFTKLPIIDQCVVLLQILKFFKCNAETANISLIGGGETCGRLYLNKNITDAKFDIICKSPAGLTERIKKV

SEQ ID NO: 1308 - protein, 133 aa, synthetic construct
  REGION 1..133: note = MG44-57 PI domain
VSFLKKLKEDNSYQYSPKFAGFSDSELNELLNILKWKIINTKFKNISDSVTKLLKATQFDENLVLSIPDKAKLVMNLVGIFENRDHFNDLSLIGGKKQMGRLLKSIKPKGDFSIVYQSVTGFYVHEIKLNELK

SEQ ID NO: 1309 - protein, 148 aa, synthetic construct
  REGION 1..148: note = MG44-60 PI domain
SKFFSLSNANVTMDISRDKIVVSPAKSKNGKELSLTKEENIQIYKKIADYVNTDMYSVITKGEISKILNEKIEGFSNLEMVEQSKFLYGMVTTISNRGNLIWKLDAIGRSGQLTNYRINKNVTGKGYKLVKRNVLGYVIYQQDLENVR

SEQ ID NO: 1310 - protein, 149 aa, synthetic construct
  REGION 1..149: note = MG44-61 PI domain
LKLLEMDKNGLVDKNASEYVMKTNRMGDVKLVVDKAHNESLYDCFVEKLQKNEQDKVSLKYGNLSPFVTFGKNLQNGKEKFTNLTTLEQSYVIVQILRFFKCDAQTADIQLVGGSSMSGKVLFNKDITDVDFRLVDQSPCGLIVRTRKL

SEQ ID NO: 1311 - protein, 142 aa, synthetic construct
  REGION 1..142: note = MG44-82, MG44-65 PI domain
VKLLEMAKNPTFDVNCEKYELTPNRERGEKITIDRESNIKLYDFFLSKFDCSKFKGVSSYVTFGKNLSIGREKFVALTVSQQVNVLNQIVNFFKCNAETADIELIGGSKISGKILFNKNITDVDFRIISQSPCGLTVHVKRV

SEQ ID NO: 1312 - protein, 109 aa, synthetic construct
  REGION 1..109: note = MG44-68 PI domain
SKLVEMAKNGTISEENGEYIIKTNRNKDVKLTINRQSNIELYDTLKNKLSKPSYQGLSPFSTFRKNLESGEEKFANLSVTDQCTVLFQIEFYDCAWRKRKTYLAASDCV

SEQ ID NO: 1313 - protein, 142 aa, synthetic construct
  REGION 1..142: note = MG44-76 PI domain
LKLADMKAKGVINVGQEEFVMKTNRDGERKLVIDRANNADLYDMLKRKLERENYAGLSAFATFRKNLEKGEEKFNSLTVYEQTVVLLQILKFFKCNAETADTTLVGGSAKSGSIKFNNNITNVDFRLIDLSPAGLTERVRKV

SEQ ID NO: 1314 - protein, 142 aa, synthetic construct
  REGION 1..142: note = MG44-77 PI domain
LKLADMKAKGIINVGQEEFVMKTNRDGERKLVIDRANNADLYGMLKRKLERENYAGLSAFATFRKNLEKGEEKFNSLTVYEQTVVLLQILKFFKCNAETADTTLVGGSAKSGSIKFNNNITNVDFRLIGLSPAGLTERVRRV

SEQ ID NO: 1315 - protein, 142 aa, synthetic construct
  REGION 1..142: note = MG44-78 PI domain
LKLLEMDKNGLVDKNASEYVMKTNRMGDVKLVVDKAHNENLYNCFVEKLQGGKYGKLSSFVTFGKNLQSGKEKFTNLTTLEQSYVIVQILRFFKCDGQEADIRLIGGSEQSGSIKFGNGITDVDFRLVDQSPCGLTVRTRKL

SEQ ID NO: 1316 - protein, 142 aa, synthetic construct
  REGION 1..142: note = MG44-79 PI domain
LKLADMKAKGIINVGQEEFVMKTNRDGERKLVIDRANNADLYDMLKRKLERENYAGLSAFATFRKNLEKGEEKFNSLTVYEQTGVLLQILKFFKCNAETADTTLVGGSAKSGSIKFNNNITNVDFRLIDLSPAGLTERVRKV

SEQ ID NO: 1317 - protein, 142 aa, synthetic construct
  REGION 1..142: note = MG44-80 PI domain
LKLADMKAKGIINVGQEEFVMKTNRDGERKLVVDRANNADLYGMFKRKLERENYAGLSAFATFRKNLEKGEEKFNSLTVYEQTVVLLQILKFFKCNAETADTTLVGGSAKSGKILINNNITNVDFRLIDLSPAGLTERVRKV

SEQ ID NO: 1318 - protein, 142 aa, synthetic construct
  REGION 1..142: note = MG44-83 PI domain
SKLVEMAKNGTISEENGEYIIKTNRNKDVKLTINRQSNIELYDTLKNRLLKSNFQGLPSFSTFRKNLENGENNFVNLSLTDQCSVLLQLLKFFKCNAETADISLIGGGGRSGTLYLNKDISKVDFKIICKSPAGLTERIKKV

SEQ ID NO: 1319 - protein, 142 aa, synthetic construct
  REGION 1..142: note = MG44-90 PI domain
LKLLDMNSKNMVAHDETEYVIKTNRNGERKLVITKESNIKLYDVLRNKLDSDIYSGISAFKTFKGNLDNSSVIFAELNIIDQAKVIIQVLKVFKNNAETADIRLIGGGPQSCRIQINKNITDVDFKIIDLSPAGLTRRIRKV

SEQ ID NO: 1320 - protein, 142 aa, synthetic construct
  REGION 1..142: note = MG44-91 PI domain
SKLVEIAKSGTITEENGEYIIKTNRNKDVKLTINRQSNIELYDTLKNKLSKPSYQGLSPFSTFRKNLESGEEKFANLSVTNQCTVLLQILKFFKCNAELANISLIGGGKGSGRILFNKDITNADFKIICKSPAGLTERIKKV

SEQ ID NO: 1321 - protein, 142 aa, synthetic construct
  REGION 1..142: note = MG44-93 PI domain
LKLADMKAKGIINVGQEEFVMKTNRDGERKLVIDRANNADLYGMLKRKLERENYAGLSAFATFRKNLEKGEEKFNSLTVYEQTVVLLQILKFFKCNAETADISSIGGGKIVGKIYVNINITNIDFRLIDLSPAGLTERVRKV

SEQ ID NO: 1322 - protein, 22 aa, synthetic construct
  REGION 1..22: note = MG44-94 PI domain
LKIVEMAKQPTFNKNSDCYGGY

SEQ ID NO: 1323 - protein, 142 aa, synthetic construct
  REGION 1..142: note = MG44-96 PI domain
LKIVDMDAKKMLVGDEPRYVTKTNRYKKEKVVIDKEKNLELYSRLKDKLSDKIYSGLSAFSTFAKNMESGEEKFKELAIVEQAKTLIQILKMFKCNAETSDLKFIGGSSRSGTVSINKKIDGVNFEIIHLSPAGLRVIKNKV

SEQ ID NO: 1324 - protein, 142 aa, synthetic construct
  REGION 1..142: note = MG44-97 PI domain
LKLADMKAKGVINVGQEEFVMKTNRDGERKLVIDRANNADLYGMLKRKLERENYAGLSAFATFRKNLEKGEEKFNSLTVYEQTVVLLQILKFFKCNAETADITLIGGSGRSGVISINKSVTDVDFRLIDLSPAGLIERVRKV

SEQ ID NO: 1325 - protein, 142 aa, synthetic construct
  REGION 1..142: note = MG44-99, MG44-98 PI domain
LKIVEMAKQPTFNKNSDCYIVKTNRMGDIKLVVDKGSNVKLYDELILKLECKQFQGFGAYTSFRNVLTESREKFVDLSTLEQAIVLLEVLKFFKNNADTADLSLIGESKRAGILRFSKNITDVDFRIISQSPCGLTVHIKRV

SEQ ID NO: 1326 - protein, 142 aa, synthetic construct
  REGION 1..142: note = MG44-100 PI domain
LNLEDMKSKKAVNVGDEEFLMKTDHTGAEKLVIDKATNIALYRDLMRRLGLKIYSGISAFATFAKNMENGEDKFISLTVCDQATVLLQILKFFKCNAEISDITLIGGSGKSGTVLLNKNITDVDFEIINLSPAGLIERVRKV

SEQ ID NO: 1327 - protein, 146 aa, synthetic construct
  REGION 1..146: note = MG44-114, MG44-101 PI domain
EKFVSRLKNKSIKIKYEKDKSGFTDEDLSSIYSELKDKSKNSVFKNLPKPIVKMLSDVDINNYKYQESEKSEPKLLTIEQKAVAICELIKTFHTESSNLLFLGEKKGSGVKRIKTVLDLEKTDYSILCSSITGFYEKEIRLRDLLK

SEQ ID NO: 1328 - protein, 143 aa, synthetic construct
  REGION 1..143: note = MG44-102 PI domain
EKYQNMPATIKELLKTTDEEIIVSPAVKTNSKQLAISRTNNVYLYDLIVAQLGKKIYNLSSISGLVKKLTNARSVFLSLSISAQAELLLGLVKYVGGAYNVDLALLGESQHAGSTTIGKNISNLNISLIEQSVTGLYAKETVL

SEQ ID NO: 1329 - protein, 168 aa, synthetic construct
  REGION 1..168: note = MG44-104 PI domain
SLVNEKINKEFIKRKTDKGELSDDEFRRKLFVEQEEEKTRRENDSDQKNKSKILHVTKEKNNELYDLFLDKVSNEKSPYAYLPAYSSFKNTLEKGKEIFYQMDEYNGLRCLLNLIVAFQCNARNVDASNVGGGKYMCNIATSKDITDKSVTFISQSVTGLKEKRIKIN

SEQ ID NO: 1330 - protein, 142 aa, synthetic construct
  REGION 1..142: note = MG44-105 PI domain
LKLADMKAKGVINVGQEEFVMKTNRDGERKLVIDRANNADLYGMLKRKLERENYAGLSAFATFRKNLEKGEEKFNSLTVYEQTVVLLQVLKFFKCNAETADTTLVGGSTKSGSIKFNNNITNVDFRLIDLSPAGLTERVRKV

SEQ ID NO: 1331 - protein, 143 aa, synthetic construct
  REGION 1..143: note = MG44-106 PI domain
EKYKNMPQVAKECLKEDGEKLVVSPAVKENSRPQIITRTQNVELYDLIINQLSKKIYDLSSIKAIVSNLKDKRDLFIALSIPNQTEILLNLVKYVGGGYFADLKLLGGTEYMGATTFGKNITDLNIYLIEQSVTGLYSKGTKL

SEQ ID NO: 1332 - protein, 146 aa, synthetic construct
  REGION 1..146: note = MG44-110, MG44-126, MG44-141, MG44-143, MG44-174, MG44-22, MG44-48, MG44-107 PI domain
DNFVSRLKNKSFEVKYDKDKSGFTEEDLSSIYSELKDKTKNTVLKALPKTTVKILTDVDINSYQYSENEKSEPKLLSIEQKAVAICEVIKAFHTEPSDLSLLGGKANSGKMCINSVLNLDKDDYSVVFYSITGFYEKELRLSDLLK

SEQ ID NO: 1333 - protein, 142 aa, synthetic construct
  REGION 1..142: note = MG44-133, MG44-20, MG44-37, MG44-38, MG44-45, MG44-49, MG44-71, MG44-72, MG44-84, MG44-108 PI domain
LKLADMKAKGIINVGQEEFVMKTNRDGERKLVIDRANNADLYDMLKRKLERENYAGLSAFATFRKNLEKGEEKFNSLTVYEQTVVLLQILKFFKCNAETADTTLVGGSAKSGSIKFNNNITNVDFRLIDLSPAGLTERVRKV

SEQ ID NO: 1334 - protein, 142 aa, synthetic construct
  REGION 1..142: note = MG44-122, MG44-109 PI domain
LKLLDMNSKNMVAHDETEYVIKTNRNGERKLVITKESNIKLYDVLRNKLDSDIYSGISAFKTFKGNLDNSSVIFAELNIIDQAKVIIQVLKALKNNAETADIRLIGGGPQSCRIQINKNITDVDFKIIDLSPAGLTRRIRKV

SEQ ID NO: 1335 - protein, 146 aa, synthetic construct
  REGION 1..146: note = MG44-177, MG44-41, MG44-73, MG44-111 PI domain
EKFVSRLKNKSIKIKYEKDKSGFTDEDLSSIYSELKDKSKNSVFKNLPKPIVKMLSDVDINNYKYQESEKSEPKLLTIEQKAVAICELIKAFHTESSNLLFLGEKKGSGVKRIKTVLDLEKTDYSILCSSITGFYEKEIRLRDLLK

SEQ ID NO: 1336 - protein, 143 aa, synthetic construct
  REGION 1..143: note = MG44-169, MG44-228, MG44-240, MG44-70, MG44-112 PI domain
EKYKNMPQVAKECLKEDGERLIVSPAVKENSRPQIITRTQNVELYDLIINQLSKKIYDLSSIKAIVSNLKDKRDLFIALSIPNQTEVLLNLVKYVGGGYLADLKLLGGTEHMGTTRISKDITDLNIYLIEQSVTGLYSKGTKL

SEQ ID NO: 1337 - protein, 142 aa, synthetic construct
  REGION 1..142: note = MG44-247, MG44-113 PI domain
LKLLEMDKNGRVDKTASEYVMKTNRMGDVKLVVDKAHNENLYNCFVEKLQGGKYGKLSSFVTFGKNLQSGKEKFANLTTLEQAYVIVQILRFFKCDAQTADIRLIGGSGLSGKVLFNKDITTVDFQLIDQSPCGLTVRTRKL

SEQ ID NO: 1338 - protein, 142 aa, synthetic construct
  REGION 1..142: note = MG44-116, MG44-166, MG44-115 PI domain
LKLVEMAKQPTFNKNSDCYIVKTNRMGDIKLVVDKESNVKLYDELILKLECKRFQGFGAYTSFRNVLTESREKFVGLSTLEQAIVLLEVLKFFKNNADTADLSLIGESKCAGKLRFSKNITDVDFRIISQSPCGLTVHVKRV

SEQ ID NO: 1339 - protein, 142 aa, synthetic construct
  REGION 1..142: note = MG44-117 PI domain
VKILKLNDKNMIKKDESEYPTKVNSKEGKKLSVTAEMNIKFYRYLKDKMNDKIFAGISTFKKFSKALAKGEEAFISLSTLDQSKVLLQILKFLKCNGDTADTRLIGGSGRSGTICLNKDITDVDFKLIDFSPAGLTERIRRV

SEQ ID NO: 1340 - protein, 143 aa, synthetic construct
  REGION 1..143: note = MG44-24, MG44-118 PI domain
EKYQNMPATIKELLKTTDEEIIVSPAVKTNSKQLAISRTNNVYLYDLIIAQLGKKIYSLSSISGLVKKLTNARSVFLSLSISAQAELLLGLVKYVGGAYNVDLALLGESQYAGSTTIGKNISNLNISLIEQSVTGLYAKETVL

SEQ ID NO: 1341 - protein, 142 aa, synthetic construct
  REGION 1..142: note = MG44-128, MG44-172, MG44-226, MG44-244, MG44-34, MG44-85, MG44-87, MG44-119 PI domain
IKIIGMGDNGIITGNESQYITKTNKDGVIRIVVNKENNEKLYETLKNKLDSKIYKGLSAFASFKKNMERGKDKFCELSVLEQAKVLLQILKVFRCNAEISDIQAIGGTAHSGKKLFAKNITDVDFKLVNLSPAGLTVRIRKV

SEQ ID NO: 1342 - protein, 142 aa, synthetic construct
  REGION 1..142: note = MG44-250, MG44-121 PI domain
LNLEDMKSKKAVNVGDDKFVMKTDHTGAEKLVIDKATNIALYRDLMRRLGLKIYSGISAFATFAKNMKSGEDKFISLTVCDQATVLLQILKFFKCNAEISDITLIGGSGKSGTVLLNKNITDVDFEIINLSPAGLIERVRKV

SEQ ID NO: 1343 - protein, 134 aa, synthetic construct
  REGION 1..134: note = MG44-31, MG44-33, MG44-40, MG44-88, MG44-124 PI domain
VSFLKKLQEDNSYQYSPKFAGFSDSELNELLNILKWKITNTKFKNISEPVTKLLLKITQFDENLVLSIPDKAKLVMNLVGIFENRDHTNDLSLIGGKKQMGRLKKSIKPKGDFSIVYQSVTGFYVHEIKLNELK

SEQ ID NO: 1344 - protein, 143 aa, synthetic construct
  REGION 1..143: note = MG44-127 PI domain
EKYKNMPQVAKECLKEDGERLVVSPAVKENSRPQIITRTQNVALYDLIINQLSKKIYALSSIKAIVSNLKDKRDLFIALSIPNQAEVLLNLVKYVGGGYLVDLKLIGGTEQMGTTRISKDITNLNISLIEQSVTGLYSKGRKL

SEQ ID NO: 1345 - protein, 142 aa, synthetic construct
  REGION 1..142: note = MG44-129 PI domain
SKLVEMAKNETISEENGEYIIKTNRNKDVKLTINKHSNIELYDTLKNKLSKPSYQGLSPFSTFRKNLEGGEEKFANLSVADQCTVLLQILKFFKCNAETADIVLIGGSGRSGCILFNKDVSKADIKIICKSPAGLTERIKKV

SEQ ID NO: 1346 - protein, 142 aa, synthetic construct
  REGION 1..142: note = MG44-134, MG44-55, MG44-58, MG44-130 PI domain
LKLADMKAKGIINVGQEEFVMKTNRDGERKLVIDRANNANLYDMLKRKLERENYAGLSAFATFRKNLEKGEEKFNSLTVYEQTVVLLQILKFFKCNAETADTTLVGGSAKSGSIKFNNNITNVDFRLIDLSPAGLTERVRKV

SEQ ID NO: 1347 - protein, 142 aa, synthetic construct
  REGION 1..142: note = MG44-135 PI domain
LKLLEMDKNGRVDKTASEYVMKTNRMGDIKLVVDKAHNEKLYDCFVEKLQSGKYGNLSSFVTFGKNLQNGQEKFANLTTLEQAYVIVQILRFFKCDAQTADIRLIGGSGLSGKVLFNKDITTIDFQLVDQSPCGLTVRTRKL

SEQ ID NO: 1348 - protein, 142 aa, synthetic construct
  REGION 1..142: note = MG44-64, MG44-137 PI domain
SKLVEMAKNGTISEENGEYIIKTNRNKDVKLTINRQSNIELYETLKNKLSKPSYQGLSPFSTFRKNLESGEEKFANLSVADQCTVLLQILKFFKCNAETADIVLIGGSGRSGCILFNKDVSKADFKIICKSPAGLTERIKKV

SEQ ID NO: 1349 - protein, 146 aa, synthetic construct
  REGION 1..146: note = MG44-138 PI domain
ESFERKVKLNDKKVNFVYDEKKSGFSEQDLTNLFSELKSKVENTFFNCLPAVITNVLKNIDLQTYRVKEKDSDERLLTVEQKVHVVVELLKAFQSNGASSDLHDIGESKNSGIVRTTELDFEKYSIINYSVTGFYFIETKLRDLIK

SEQ ID NO: 1350 - protein, 142 aa, synthetic construct
  REGION 1..142: note = MG44-139 PI domain
LKIVEMAKQPTFNKNSDCYIVKTNRMGDIKLVVDKESNVKLYDELILKLECKRFQGFSAYTSFRNVLTESREKFVGLSTLEQAIVLLEVLKFFKNNADTADLSLIGESKRAGILRFSKNITDVDFRIISQSPCGLTVHVKRV

SEQ ID NO: 1351 - protein, 142 aa, synthetic construct
  REGION 1..142: note = MG44-140 PI domain
LKLADMKAKGIINVGQEEFVMKTNRDGERKLVIDRANNADLYGMLKRKLERENYAGLSAFATFRKNLEKGEEKFNSLTVYEQTVVLLQILKFFKCNAETADISSIGGGKIVGKIYVNINITNVDFRLIDLSPAGLTERVRKV

SEQ ID NO: 1352 - protein, 142 aa, synthetic construct
  REGION 1..142: note = MG44-142 PI domain
IKIIGMGDNGIITGNESQYITKTNKDGVIRIVVNKENNEKLYETLKNKLDSKIYKGLSAFASFKKNMERGKDKFCELSVLEQAKVLLQILKVFRCNAVNSNIELIGGGRGSGSIKINKNITDVDFKLVNLSPAGLTVRIRKV

SEQ ID NO: 1353 - protein, 142 aa, synthetic construct
  REGION 1..142: note = MG44-144 PI domain
LNLEDMKSKKAVNVGDDKFVMKTDHTGAEKLVIDKATNIALYRDLMRRLGLKIYSGISAFATFAKNMENGEDKFISLTVCDQATVLLQILKFFKCNAETSDITLIGGSGKSGTVLLNKNITDVDFEIINLSPAGLIERVRKV

SEQ ID NO: 1354 - protein, 142 aa, synthetic construct
  REGION 1..142: note = MG44-241, MG44-146 PI domain
IKIIGMGDNGIITGNESQYITKTNKDGVVRIVVNKENNEKLYETLKNKLDSKIYKGLSAFASFKTNMERGKDKFCELSVLEQAKVLLQILKVFRCNAEISDIQAIGGTAHSGKKLFAKNITDVDFKLVNLSPAGLTVRIRKV

SEQ ID NO: 1355 - protein, 142 aa, synthetic construct
  REGION 1..142: note = MG44-147 PI domain
SKLVEMSQNNMLPNNCEEYLVKTNRNKDKKLIVNKKTNIELYTKLKEKLSDSDKYAITTLSSFYQSIERGLDIFATLSTIDQCKVLLQILKGLKCNGGRADLSLINESKESGRILFSKNITNVDFKIICKSPAGLTERIKKV

SEQ ID NO: 1356 - protein, 151 aa, synthetic construct
  REGION 1..151: note = MG44-148 PI domain
VKLLEMAKNPTFDVNCEKYELTPNRERGEKIIIGRDSNVKLYDFLLKKFDSEDDAKNKINKRFQGISSYLAFGQNLKSGREKFVSLTVLQQVNVLSQVMKFFRCNADTADIELIGGSKGSGKILFNQNITDVDFRIISQSPCGLTVHVKRV

SEQ ID NO: 1357 - protein, 148 aa, synthetic construct
  REGION 1..148: note = MG44-149 PI domain
TKFNSLSNANVTMDISRDKIVVSPAKSKNGKELSLTKEENIQIYKKIADYVNTDMYSVITKGEISKILNEKIEVFSNLEMVEQSKFLYALVTTISNRGNLIWKLDAIGRSGQLTNYRINKNVTGKGYKLVKRNVLGYVIYQQDLENVR

SEQ ID NO: 1358 - protein, 142 aa, synthetic construct
  REGION 1..142: note = MG44-168, MG44-239, MG44-150 PI domain
IKIIGMGDNGIITGNESQYITKTNKDGVIRIVVNKENNEKLYETLKNKLDSKIYKGLSAFASFKTNMERGKDKFCKLSVLEQAKVLLQILKVFRCNAVNSNIELIGGGRGSGSIKINKNITDVDFKLVNLSPAGLTVRIRKV

SEQ ID NO: 1359 - protein, 148 aa, synthetic construct
  REGION 1..148: note = MG44-151 PI domain
SKFFSLSNANVTMDISRDKIVVSPAKNKNGKELSLTKEENIQIYKKIADYVNTDMYSVITKGEISKILNEKIEVFSNLEMVEQSKFLYGMVTTISNRGNLIWKLDAIGRSGQLTNYRINKNVTGKGYKLVKRNVLGYVIYQQDLENVR

SEQ ID NO: 1360 - protein, 143 aa, synthetic construct
  REGION 1..143: note = MG44-152 PI domain
EKHQNMPATIKELLKTTDEEIIVSPAVKTNSKQLAISRTNNLYLYDLIIAQLGKKIYSLSSISGLVEKLTTARSVFLSLSISAQAELLLGLVKYVGGAYTVDLTLLGEKKQAGSTRIGKNISNLNISLIEQSVTGLYAKEIVL

SEQ ID NO: 1361 - protein, 142 aa, synthetic construct
  REGION 1..142: note = MG44-154 PI domain
LKLVEMAKQPTFNKNSDCYIVKTNRMGDIKLVVDKGSNVKLYDELILKLECKQFQGFGAYTSFRNVLTESREKFVGLSTLEQAIVLLEVLKFFKNNADTADLSLIGESKCAGKLRFNKNITDVDFRIISQSPCGLTVHVKRV

SEQ ID NO: 1362 - protein, 142 aa, synthetic construct
  REGION 1..142: note = MG44-155 PI domain
LKIVEMQSKNMLDLYSDSLVIKTNSAGDEKLVVDKDKNLELYQRLTNKLNEKIYSGISAFSTFKNNLLNGEEKFAELELPEQAKVIIQILKFFKCNAETSDLTSIGGAKGSGSIKFNKNITDVDFRLINRSPAGLTEKVHRV

SEQ ID NO: 1363 - protein, 109 aa, synthetic construct
  REGION 1..109: note = MG44-156 PI domain
EKFVSRLKNKSIKIKYEKDKSGFTDEDLSSIYSELKDKSKNSVFKNLPKPIVKMLSDVDINNYKYQESEKSEPKLLTIEQKAVAICELIKAFHTESSNLLFLGEKKAQA

SEQ ID NO: 1364 - protein, 142 aa, synthetic construct
  REGION 1..142: note = MG44-175, MG44-158 PI domain
IKIIGMGDNGIITGNESQYITKTNKDGVIRIVVNKENNEKLYETLKNKLDSKIYKGLSAFASFKTNMERGKDKFCKLSVLEQAKVLLQILKVFRCNAEISDIQAIGGTAHSGKKLFAKNITDVDFKLVNLSPAGLTVRIRKV

SEQ ID NO: 1365 - protein, 142 aa, synthetic construct
  REGION 1..142: note = MG44-74, MG44-159 PI domain
LNLEDMKSKKAVNVGDDKFLMKTDHTGAEKLVIDKATNIALYRDLMRRLGLKIYSGISAFATFAKNMKSGEDKFISLTVCDQATVLLQILKFFKCNAETSDITLIGGSGKSGTVLLNKNITDVDFEIINLSPAGLIERVRKV

SEQ ID NO: 1366 - protein, 142 aa, synthetic construct
  REGION 1..142: note = MG44-161 PI domain
LKIVEMAKQPTFNKNSDCYIVKTNRMGDIKLVVDKESNVKLYDELILKLECKRFQGFGAYTSFRNVLTESREKFVDLSTLEQAIVLLEVLKFFKNNADTADLSLIGESKCAGILRFSKNITDVDFRIISQSPCGLTVQVKRV

SEQ ID NO: 1367 - protein, 142 aa, synthetic construct
  REGION 1..142: note = MG44-162 PI domain
SKLVEMAKNGTISEENGEYIIKTNRNKDVKLTINRQTNIELYDTLKNKLSKPSYQGLSPFSTFRKNLESGEEKFANLSVTDQCTVLLQILKFFKCNAELANISLIGGGKGSGRILFNKDITNADFKIICKSPAGLTERIKKV

SEQ ID NO: 1368 - protein, 145 aa, synthetic construct
  REGION 1..145: note = MG44-243, MG44-163 PI domain
GKLVEWERTGKIAEEEKARETFSMIKNRKEEVSLLIDRSQNVALYREIVAKLQTKLYRGLSAARSFAEKLSAKEEIFVSLSVLEQAKVLLQIARFMKCNAEAADLSLLKDGAACGILLIGKNITDVDFAVIHQSPCGINTYIQRV

SEQ ID NO: 1369 - protein, 142 aa, synthetic construct
  REGION 1..142: note = MG44-164 PI domain
LKLADMKTKGILNVGQEEFVMKTNRDGERKLVIDRANNADLYGMLKRKLERENYAGLSAFATFRKNLEKGEEKFNSLTVYEQTVVLLQILKFFKCNAETADTTLVGGSAKSGSIKFNNNITNVDFRLIDLSPAGLTERVRKV

SEQ ID NO: 1370 - protein, 142 aa, synthetic construct
  REGION 1..142: note = MG44-165 PI domain
GKLSDMEKNGRIDTKQEEYVIKTNRLKEVKLTVNRKDNIALYDYLLEKLNNKRYFGVGSFLSYYRTLLKAKEIFDTLSVLKQAATLLQILRFFKCNAETSDLSTIGGPAKSGKITVDKNITETDFSIIHRSACGLTERRQKV

SEQ ID NO: 1371 - protein, 141 aa, synthetic construct
  REGION 1..141: note = MG44-167 PI domain
SKTVKLMNDKKELNIEDGNIVVAQNRFGEKSLLTKEENMKLYKELIKHLNKSIYKCISLGKIGKDLKNTYEIFENIDIVEQVKTIKGLLDIINGVSGGDITNVGGSKNSGLISFSKTLSKNPVSIINSSPTGFYQKEFKLV

SEQ ID NO: 1372 - protein, 142 aa, synthetic construct
  REGION 1..142: note = MG44-234, MG44-170 PI domain
VKLLEMAKNPTFDVNCEKYEFTPNRERGEKITIDRESNIKLYDFFLSKFDCSKFKGVSSYVTFGKNLSIGREKFVALTVSQQVNVLNQIVNFFKCNAETADIELIGGSKISGKILFNKNITDVDFRIISQSPCGLTVHVKRV

SEQ ID NO: 1373 - protein, 142 aa, synthetic construct
  REGION 1..142: note = MG44-223, MG44-66, MG44-171 PI domain
IKIIGMSDNGIITGNESQYITKTNKDGVIRIVVNKENNEKLYETLKNKLDSKIYKGLSAFASFKTNMERGKDKFCELSVLEQAKVLLQILKVFRCNAEISDIQAIGGTAHSGKKLFAKNITDVDFKLVNLSPAGLTVRIRKV

SEQ ID NO: 1374 - protein, 142 aa, synthetic construct
  REGION 1..142: note = MG44-227, MG44-173 PI domain
GKLSDMEKNGRIDTQQEEYVIKTNRLKEVKLTVNRKDNIALYDYLLEKLNDKRYFGVGSFLSYYRTLLKAKEIFDTLSVLKQAATLLQILRFFKCNAETSDLSTIGGSNRSGTIRINKDITETEFSIIHRSACGLTERRQKV

SEQ ID NO: 1375 - protein, 151 aa, synthetic construct
  REGION 1..151: note = MG44-26, MG44-178 PI domain
VKLLEMAKNPTFDVSCEKYELTPNRERGEKIIIDRDSNVKLYDFLLKKFDSEGDAKNKINKRFQGISSYLAFGQNLKSGREKFVSLTVLQQVNVLSQVMKFFRCNADTADIELIGGSKGSGKILFNQNITDVDFRIISQSPCGLTVHVKRV

SEQ ID NO: 1376 - protein, 142 aa, synthetic construct
  REGION 1..142: note = MG44-179 PI domain
LKITDMKAKNMIMSEDESYAVKTNRSGNDKLVVNRDKNVALYRDFKNRLSKPAYKGISAFETFKNNLEKSEDKFISLTVTEQARVLLQILKLFKCNAETVDLSLLGGAGRSGTLLVNKNITNVDFKLINYSPAGLTKKVRTV

SEQ ID NO: 1377 - protein, 142 aa, synthetic construct
  REGION 1..142: note = MG44-180 PI domain
LNLEDMKSKKAVNVGDDKFVMKTDHTGAEKLDIDKATNIALYRDLMRRLGLKIYSGISAFATFAKNMKSGEDKFISLTVCDQATVLLQILKFFKCNAEISDITLIGGSGKSGTVLLNKNITDVDFEIINLSPAGLIERVRKV

SEQ ID NO: 1378 - protein, 142 aa, synthetic construct
  REGION 1..142: note = MG44-181 PI domain
SKLVEMSQNNMLPNNCEEYLVKTNRNKDKKLIVNKKTNMELYIKLKEKLSDSDKYAITTLSSFYQSIERGSDIFATLSTIDQCKVLLQILKGLKCNGGRADLSLINESKESGRILFSKNITNADFKIICKSPAGLTERIKKV

SEQ ID NO: 1379 - protein, 143 aa, synthetic construct
  REGION 1..143: note = MG44-182 PI domain
EKHQNMPATIKELLKTTDEEIIVSPAVKTNSKQLAINRTNNLYLYDLIIAQLGKKIYSLSSISGLVEKLTTARSVFLSLSISAQAELLLGLVKYVGGAYTVDLTLLGEKKQAGSTRIGKNISNLNISLIEQSVTGLYAKEIVL

SEQ ID NO: 1380 - protein, 142 aa, synthetic construct
  REGION 1..142: note = MG44-183 PI domain
VKLLEMAKNPTFDVNCEKYEFTPNRERGEKITIDRNSNIKLYDFLLLKFENKKFRGISSYLSFERNLYSGREKFIELTVLQQVWILSQIKQFFKCNDKSADIELIGGSKGSGKIVFGKNITDVDFRIISQSPCGLTVHVKRV

SEQ ID NO: 1381 - protein, 142 aa, synthetic construct
  REGION 1..142: note = MG44-184 PI domain
LKLADMKARGVINVGQEEFVMKTNRDGERKLVIDRANNADLYGMLKRKLERENYAGLSAFATFRKNLEKGEEKFNSLTVYEQTVVLLQILKFFKCNAETADISSIGGGKIVGKIYVNINITNVDFRLIDLSPAGLTERVRKV

SEQ ID NO: 1382 - protein, 142 aa, synthetic construct
  REGION 1..142: note = MG44-185 PI domain
LKLLDMDAKKMLLGDEPRYVIKTNRNKEEKLVIDKEKNVELYGYLKNKLCDKIYSGLSAFATFAKNIENGKEKFIDLTIVEQAKVLIQILMMFKRKDTLSDLTLIGGSSLSGKIRIGKKIDGVNFEIIHLSPAGLRVIKNKV

SEQ ID NO: 1383 - protein, 126 aa, synthetic construct
  REGION 1..126: note = MG44-187 PI domain
DEKSVEFEFAKGKIISKSDIKLVFEAIVNQLKKPFYGKYAFVKKFNEGKLNIDKFYEANLLDQMKFILSMLNLITLNGSLFNAELIDGAANETCKYLTNLKGCSVYLISQSVTGLYEKRIKIIDPQ

SEQ ID NO: 1384 - protein, 146 aa, synthetic construct
  REGION 1..146: note = MG44-188 PI domain
IKLADTLREGRIGDGEKNKEQFIMHTNRFGKNKTVVDKEHNEQLYEVITEKLSNKAYVGLSAAKTFLNNVSAGKENFKNLSALDQALALIQIMKFLKCNAETSNLEKIGASARAGSILINKNISNVSFKIIHTSPCGLTVRKIAIK

SEQ ID NO: 1385 - protein, 146 aa, synthetic construct
  REGION 1..146: note = MG44-189 PI domain
ESFERKVKLNDKKVNFVYDEKKSGFSEQDLTNLFSELKSKVENTFFNCLPVVITNVLKNIDLQTYRVKEKDSDERLLTIEQKVHVVVELLKAFQSNGASSDLHDIGESKNSGIVRTTELDFEKYSIINYSVTGFYFIETKLRDFIK

SEQ ID NO: 1386 - protein, 133 aa, synthetic construct
  REGION 1..133: note = MG44-193, MG44-190 PI domain
VKNVSRLQPVKKEDEKKNIVIENITLSDTEVLFEAIVEQLKKKFYENYTFAKKIKDGNVSFDKFKSLELFKRIEVLNEMLKNINHSSSICHADAVGGAANDNCKWNKANPKRKVSLVTYSPSGLFENVIPLIN

SEQ ID NO: 1387 - protein, 135 aa, synthetic construct
  REGION 1..135: note = MG44-195 PI domain
AKNISRLQSAKKDNKKIKIDIENITFSDTEYLFNAIVEQLRKKFYSNYTFAKKIMAGDVTLERFKKLDLVRRIEILNEIMKNINHSSSVCKSNEIGGAKNGDNCRWNQANPKGRKVSLVTYSPSGLFEKVIPLIN

SEQ ID NO: 1388 - protein, 126 aa, synthetic construct
  REGION 1..126: note = MG44-196 PI domain
DDNSVEFEFAKGKIISKSDIKLVFEAIVNQLKKPFYGKYAFVKKFNEGKLNIDKFYEANLLDQMKFILSMLNLITLNGSLFNAELIDGAANETCKYLTNLKGCSVYLISQSVTGLYEKRIKIIDPQ

SEQ ID NO: 1389 - protein, 142 aa, synthetic construct
  REGION 1..142: note = MG44-199 PI domain
KKLLDMNKEVKQKPESEEFIMKTNNEGVRKLVITRQSNIEKYDMLAAQLGKDFYQVLSPFRNVKKIIDEGKEKFCELLVIDQCYVLMQILSYLQCKGATADLQLIGGSGRSGQIRFNKDITNVDFRIYDTSPTGLFVKESKA

SEQ ID NO: 1390 - protein, 142 aa, synthetic construct
  REGION 1..142: note = MG44-201 PI domain
LKIVEMAKQPTFNKNSDCYIVKTNRMGDIKLVVDKESNVKLYDELILKLECKQFQGFGAYTSFRNVLTESREKFVDLSTLEQAIVLLEVLKFFKNNADTADLSLIGESKRAGILRFSKNITDVDFRIISQSPCGLTVHVKRV

SEQ ID NO: 1391 - protein, 142 aa, synthetic construct
  REGION 1..142: note = MG44-202 PI domain
LKLADMKTKGIINVGQEEFVMKTNRDGERKLVIDRANNADLYDMLKRKLERENYAGLSAFATFRKNLEKGEEKFNSLTVYEQTVVLLQILKFFKCNAETADTTLVGGSAKSGSIKFNNNITNVDFRLIDLSPAGLTERVRKV

SEQ ID NO: 1392 - protein, 142 aa, synthetic construct
  REGION 1..142: note = MG44-203 PI domain
LKLADMKAKGIINVGQEEFVMKTNRDGERKLVIDRANNADLYGMLKRKLERENYAGLSAFATFRKNLEKGEEKFNSLTVYEQTVVLLQILKFFKCNAETADTTLVGGSAKSGSIKFNNNITNVDFRLIDLSPAGLTERVRKV

SEQ ID NO: 1393 - protein, 142 aa, synthetic construct
  REGION 1..142: note = MG44-204 PI domain
GKLSDMEKNGRIDTQQEEYVIKTNRLKEVKLTVNRKDNIALYDYLLEKLNDKRYFGVGSFLSYYRTLLKAKEIFDTLSVLKQAATLLQILRFFKCNAETSDLSTIGGPAKSGKIRINKDITETEFSIIHRSACGLTERRQKV

SEQ ID NO: 1394 - protein, 142 aa, synthetic construct
  REGION 1..142: note = MG44-229, MG44-42, MG44-205 PI domain
IKIIGMGDNGMITGNESQYITKTNKDGVIRIVVNKENNEKLYETLKNKLDSKIYKGLSAFASFKTNMERGKDKFCELSVLEQAKVLLQILKVFRCNAKKSNIELIGGGCDSGSIKINKNITDVDFKLVNLSPAGLTVRIRKV

SEQ ID NO: 1395 - protein, 142 aa, synthetic construct
  REGION 1..142: note = MG44-206 PI domain
IKIIGMGDNGIITGNESQYITKTNKDGVVRSVVNKENNEKLYETLKNKLDSKIYKGLSAFASFKTNMERGKDKFCELSVLEQAKVLLQILKVFRCNAVNSNIELIGGGRGSGSIKINKNITDVDFKLVNLSPAGLTVRIRKV

SEQ ID NO: 1396 - protein, 142 aa, synthetic construct
  REGION 1..142: note = MG44-207 PI domain
LKIVEMAKQPTFNKNSDCYIVKTNRMGDIKLVVDKESNVKLYDELILKLECKQFQGFGAYTSFRNVLKESREKFVDLSTLEQAIVLLEVLKFFKNNADTADLSLIGESKRAGILRFSKNITDVDFRIISQSPCGLTVHVKRV

SEQ ID NO: 1397 - protein, 143 aa, synthetic construct
  REGION 1..143: note = MG44-208 PI domain
EKYQNMPAAIKELLKTTDEEIIVSPAVKTNSKQLAISRTNNVYLYDLIVAQLGKKIYNLSSISGLVKKLTNARSMFLSLSISAQAELLLGLVKYVGGAYNVDLSLLGESQHAGSTTIGKNISNLNISLIEQSVTGLYAKETVL

SEQ ID NO: 1398 - protein, 145 aa, synthetic construct
  REGION 1..145: note = MG44-210 PI domain
GKLVEWERTGKIAEEEKARETFSMIKNRKEEVSLLIDRSQNVALYREIVAKLQTKLYQGLSAVRSFAEKLSAKEEIFVSLSVLEQAKVLLQIARFMKCNAEAADLSLLKDGSRCGILLIGKNITDVDFAVIHQSPCGINTYIQRV

SEQ ID NO: 1399 - protein, 142 aa, synthetic construct
  REGION 1..142: note = MG44-236, MG44-246, MG44-86, MG44-211 PI domain
LKIVEMAKQPTFNKNSDCYIVKTNRMGDIKLVVDKGSNVKLYDELILKLECKQFQGFGAYTSFRNVLTESREKFVDLSTLEQAIVLLEVLKFFKNNADTADLSLIGESKRAGILRFSKNITDVDFRIISQSPCGLTVHVKRV

SEQ ID NO: 1400 - protein, 142 aa, synthetic construct
  REGION 1..142: note = MG44-213 PI domain
GKLSDMEKNGRIDTQQEEYVIKTNRLKEVKLTVNRKDNIALYDYLLEKLNNKRYFGVGSFLSYYRTLLKAKEIFDTLSVLKQAATLLQILRFFKCNAETSDLSTIGGPNRSGTIRINKDITETEFSIIHRSACGLTERRQKV

SEQ ID NO: 1401 - protein, 142 aa, synthetic construct
  REGION 1..142: note = MG44-214 PI domain
SKLVEMAKNGTISEENGEYIIKTNRNKDVKLTINRQSNIELYDTLKNKLSKPSYQGLSPFSTFRKNLESGEEKFANLSVADQCTVLLQILKFFKCNADTADISLIGGGETCGRIRFNKDISKVNFEIVCKSPAGLTERIKKV

SEQ ID NO: 1402 - protein, 142 aa, synthetic construct
  REGION 1..142: note = MG44-215 PI domain
SKLVEMAKNGTISEENGEYIIKTNRNKDVKLTINRQSNIELYDTLKDRLSKPIYQGLSPFSTFRKNLESGEEKFANLSVTDQCTVLLQILKFFKCNAETADIVLIGGSSGSGSIKFNKDISDIDFEIICKSPAGLTERIKKV

SEQ ID NO: 1403 - protein, 145 aa, synthetic construct
  REGION 1..145: note = MG44-217 PI domain
AKLLERERAGEYSAEEKAQEVFPMHVNRLGEVKQTVDRAQNQALYDLMLRQLGKPVYGGISGAVSFRNTLNSRREQFAALPVLKQAKVLIQIAKFLKCNAESADLTELGEGANCGLLRVGKNITDVDFRIVDQSPCGLSIRERKV

SEQ ID NO: 1404 - protein, 143 aa, synthetic construct
  REGION 1..143: note = MG44-218 PI domain
GKLLDSEKTRKSEDLSDEVFVMHTNRFGEVKLKIDREQNLELYQKILKQLSKKIYGGISGAVHFRAVLQNAENKFASLTVFGQSKVLIQILKFLKCNAETSDLTLLGEGGRCGTLTINKNITDLEFSVVHVSPCGLDEKERKI

SEQ ID NO: 1405 - protein, 143 aa, synthetic construct
  REGION 1..143: note = MG44-219 PI domain
GKLLEREKKGEIVNAGDEVFVMHTNRLGEIRFKIDREQNEDLYEAILHQLSKKVYGGISGAVYFSSTLQNKADKFKSLTVLEQAKTLMQIVKFLKCNAEAANLNLLDEGSACGKLGINKNITGVDFEVVHSSPCGLDEKVRKV

SEQ ID NO: 1406 - protein, 158 aa, synthetic construct
  REGION 1..158: note = MG44-220 PI domain
FKFKKLIDDKNFSKETVEEWKETPHDIEFATRERNKNIKEGKKISRENNLKLYDAIIEQIKKPFYQNYPTGKKVREEKILREKFEILKTFSQMEQLVELLNVITMNKANADTTNIGGVKYDECKYKISGCNNVTSKNIILITQSPTGLFENKIAINLK

SEQ ID NO: 1407 - protein, 151 aa, synthetic construct
  REGION 1..151: note = MG44-252, MG44-254, MG44-255, MG44-256, MG44-258, MG44-221 PI domain
NRYLREIELREKEDTELLTSNEPYTIIIGNRNEKEKVQKIVISKESNEKTYLELAMHFAKDIYEHIFRGVNDTLLSNLDNFKTKSIYEQANIIKQLVMLLQTGALPASINLTSVGLNKSINRNRNINLIEKGDKLLIQSITGLYDKEICLA

SEQ ID NO: 1408 - protein, 154 aa, synthetic construct
  REGION 1..154: note = MG44-222 PI domain
YKYFEQLEIRSNRKKMNENEMQSLKEIQVIFSSNEKRRQNENRLRFITLEKNKIVFENLIKQIAKPIYEKSFGKRRDIIISNKDQFYKLGLERQIEVISNLHRFIKSGVPGRIDLEELGVKSGNLTMNYKIEDLSIIKQSITGLYQKEIIIKQV

SEQ ID NO: 1409 - protein, 184 aa, synthetic construct
  REGION 1..184: note = MG44-224 PI domain
SIMHEKAVKTAAHIPQDELKGKTAEKKSEPKINTQDLAFRALEEEKRRRKEVNEKTKIIFITKENNLKVYEFLAKKAASHPFIGVPRYDPFRDALALGKQSFVDMDEYRQLRVILKILPAFQCNALKVDMSDLNWVEEKNGIMKTVSGKKTTCNIRINKKITDKRITLIYQNKTGLKEQRFLLT

SEQ ID NO: 1410 - protein, 184 aa, synthetic construct
  REGION 1..184: note = MG44-225 PI domain
SIMHEKAVKTAAHIPQDELKGKTAEKKSEPKINTQDLAFRALEEEKRRRKEVNEKTKIIFITKENNLKVYEFLAKKAASHPFIGVPRYDPFRDALALGKQSFVDMDEYRQLRVILKILPAFQCNALKVDMSDLNWVEEKNGIMKTVSGKKTTCNIRINKKITDKRITLIYQNKTGLKEHRFLLT

SEQ ID NO: 1411 - protein, 142 aa, synthetic construct
  REGION 1..142: note = MG44-230 PI domain
VKLLEMAKNPTFDVNCEKYELTPNRERGEKITIDRESNIKLYDFFLSKFDCSKFKGFSSYVTFGKNLSIGREKFVALTVSQQVNVLNQIVNFFKCNAETADIELIGGSKISGKILFNKNITDVDFRIISQSPCGLTVHVKRV

SEQ ID NO: 1412 - protein, 142 aa, synthetic construct
  REGION 1..142: note = MG44-231 PI domain
LKITDMKAKNMIVSEDESYAVKTNRSGNDKLVVNRDKNVELYRDFKNRLSKPAYKGISTFGTFQSKLEKSEGKFISLTVIDQARVLLQILKFFKCNAEVADLTLLGDGKRCGTLRINKNITNVEVKLINYSPAGLTKKVRTV

SEQ ID NO: 1413 - protein, 142 aa, synthetic construct
  REGION 1..142: note = MG44-235 PI domain
VKLLGMKGNKSVDENASEYPTKTNRLGEVKCVINRENNEKLYRMLKEKLSEKMYSGLSSAKTFGRNLETSEEKFVSLSVMEQAEVLLQILKFFKCNAEKSNLKSVEGSPNAGTILFNKDITDVNFKLIDLSPAGLTERVRKV

SEQ ID NO: 1414 - protein, 143 aa, synthetic construct
  REGION 1..143: note = MG44-238 PI domain
EKHQNMPATIKELLKTTDEEIIVSPAVKTNSKQLAISRTNNLYLYDLIIAQLGKKIYSLSSISGLVEKLTNARSVFLSLSISAQVELLLGLVKYVGGAYTVDLTLLGEKKQAGSTRIGKNISNLNISLIEQSVTGLYAKEIVL

SEQ ID NO: 1415 - protein, 145 aa, synthetic construct
  REGION 1..145: note = MG44-245 PI domain
GKLVEWERTGKIAEEERMKEIFPMVKNRKEEVSVLIDRTQNVALYREIVTKLHSKLYQGLSAARSFAEKLSAKEESFLSLSVLEQAKVLLQIVRFMKCNAEAADLSLLKDGSRCGILSIGKNITDVDFKVIHQSPCGLSTYIQRT

SEQ ID NO: 1416 - protein, 163 aa, synthetic construct
  REGION 1..163: note = MG44-251 PI domain
YKYFEQKSLKGKKKKKDETSEVIISEDQENQEEVQQIKEIQVIFSKDEERLRFINFKKNKKVFEKLIEKIKKPIYKKSHTERRIKIINNKNEFYKLSLERQTEIIISLHKLLKTGVPGRNDIDLAEFGVKTGELTASYKIEDMSIVKQSITGLYQKEIIIKQV

SEQ ID NO: 1417 - protein, 163 aa, synthetic construct
  REGION 1..163: note = MG44-253 PI domain
YKYFEQKSLKGKKKKKDETSEVINSEDQENQEEVQQIKEIQVIFSKDEERLRFINFKKNKKVFEKLIEKIKKPIYEKSHTVRRIKIINNKNEFYKLSLERQTEIIISLHKLLKTGVPGRNDIDLAEFGVKTGGLTASYKIEDMSIVKQSITGLYQKEIIIKQV

SEQ ID NO: 1418 - protein, 156 aa, synthetic construct
  REGION 1..156: note = MG44-257 PI domain
NKYFERKAAAKVTNEDEQLSRENIEKIQVIFSFNEKEKTRKNDRLRYITRDKNEKAFECLIKQIEKPIYEKSFGSRREKILENMEKFYDLKLVRQVEIIRALHEFLKTGVPAIKIKLEELGVKSGTLTMSYKLEDMTIVKQSITGLYQKEIHIKEV

SEQ ID NO: 1419 - protein, 156 aa, synthetic construct
  REGION 1..156: note = MG44-259 PI domain
NKYIERKKETKKTNKDEQLTEENIEKIQVIFTFNGEGRTRKNDRLRYITRDKNKRAFECLIKQIEKPLYEKSHSDRRKKILENKEKFYDLKLVRQVEIVRALHELLKSGVPPSKINLEELGVKSGKLTMSYKLKDMVIVKQSITGLYQKEIHIEEV

SEQ ID NO: 1420 - protein, 140 aa, synthetic construct
  REGION 1..140: note = MG46-13, MG46-14, MG46-24, MG46-31, MG46-1 PI domain
ESFSKKKKQNNFLFVDEVYDKITKEENRELFLFLTNKVEEEPYCLIFGSQLQVLHDKENEFENLNLEQQVETLLNLLSIFKTGRTTGCDLKLLGGAGQAGIFTESSKLSNWKKSYKDVRIVDISAAGLHRKTSQNLLELL

SEQ ID NO: 1421 - protein, 140 aa, synthetic construct
  REGION 1..140: note = MG46-2 PI domain
ESFSKKKKQNNSLFVDEVYDKITKEENRELFLFLTNKIEEAPYCLIFGSQLQVLHDKENEFENLNLEQQVETLLNILSIFKTGRTTGCDLKSLGGVGQAGIFTESSKLSNWKKSYEDVRIVDISAAGLHRKISQNLLELL

SEQ ID NO: 1422 - protein, 140 aa, synthetic construct
  REGION 1..140: note = MG46-9 PI domain
ESFAKKKKQNNSLLVDEVYDKITKEENRELFLFLTNKVKEMPYCLIFGSQLQVLHDKENEFENLKLEQQVETLLNVLFIFKTGRTTGCDLKALGGAGQAGIFTESSKLSNWKKSYKDVRIVDISAAGLHRKISQNLLELL

SEQ ID NO: 1423 - protein, 140 aa, synthetic construct
  REGION 1..140: note = MG46-11 PI domain
ESFSKKKKQNNSLLVDEVYDKITKEENRELFLFLTNKVEEEPYCLIFGSQLQVLHDKENEFENLNLEQQVETLLNLLSIFKTGRTTGCDLKLLGGAGQAGIFTESSKLSNWKKSYKDVRIVDISAAGLHRKTSQNLLELL

SEQ ID NO: 1424 - protein, 140 aa, synthetic construct
  REGION 1..140: note = MG46-15 PI domain
ESFYKKKKQNNSLLVDEVYDKITKEENRELFLFLTNKVKEMPYCLIFGSQLQVLHDKENEFKNLKLEQQVETLLNVLSIFKTGRTTGCDLKALGGARQAGIFTESSKLSNWKKSYKDVRIVDISAAGLHRKISQNLLELL

SEQ ID NO: 1425 - protein, 140 aa, synthetic construct
  REGION 1..140: note = MG46-16 PI domain
ESFSKKKKQNNFLFVDEVYDKITKEKNRELFLFLTNKVEEEPYCLIFGSQLQVLHDKENEFENLNLEQQVETLLNLLSIFRTGRTTGCDLKLLGGAGQAGIFTESSKLSNWKKSYKDVRIVDISAAGLHRKISQNLLELL

SEQ ID NO: 1426 - protein, 140 aa, synthetic construct
  REGION 1..140: note = MG46-22 PI domain
ESFSKKKKQNNFLFVDEVYDKITKEENRELFLFLTNKVEEEPYCLIFGSQLQVLHDKENEFENLNLEQQVETLLNLLSIFKTGRTTGCDLKLLGGAGQAGIFTESSKLSNWKKSYKDVRIVDISAAGLHRKISQNLLELL

SEQ ID NO: 1427 - protein, 140 aa, synthetic construct
  REGION 1..140: note = MG46-42 PI domain
ESFSKKKKQNNFLFVDEVYDKITKEENRELFLFLTNKVEEEPYCLIFGSQLQVLHDKENEFENLNLEQQVETLLNLLSIFKTGRTTGCDLKLLGGAGQAGIFTESSKLSNWKKSYKDVRIVDISVAGLHRKTSQNLLELL

SEQ ID NO: 1428 - protein, 134 aa, synthetic construct
  REGION 1..134: note = MG72-1, MG46-43 PI domain
EKYLQRDQQNARERLSITERDEITSERNLWLYDELYRKQSETIYRYRPNSQCRILADGRERFLELSCEEQCAVLNEILHLLQCKSIMANLKMVGGSGLAGKILVNKVITKCNEAKLIHQSVTGLFEQEIDLLAL

SEQ ID NO: 1429 - protein, 133 aa, synthetic construct
  REGION 1..133: note = MG46-44 PI domain
EKVNNRKKRFPNTFKLYPEEDKISKEENLLLYDELTRKLGIKPFSNRPGGFFEKLQNGRSLFIELNCEEQVFELIEILQLFGTNSTLSNLSAIGCAKTAGGINISPNLDISKNKYVIINQSVTGLFEKTERLG

SEQ ID NO: 1430 - protein, 131 aa, synthetic construct
  REGION 1..131: note = MG46-49, MG46-45 PI domain
VKHAKKTKDKNVIGYEDLDGISKSSNEKIYELLLKKAKLPIYKSRPANAIKVLESGYERFKNLTLEDQISALTSILDYFGMRNGIADLQLVGGKANSGKIRIQATVNPSKKRVFIIDQSITGIYDSWFELK

SEQ ID NO: 1431 - protein, 132 aa, synthetic construct
  REGION 1..132: note = MG46-47, MG46-46 PI domain
EKFTNAKRLDKNLLIDEKYDEISREENIELYELLLKKCKLYIMRNRPGNSTGIIERGEEVFTNLPIEQQTQTLMNILNYLSMGNGCTDFSLIGGGKANGTLTLSSTIDPSKKKVCIFDQSITGIYEERLKLE

SEQ ID NO: 1432 - protein, 133 aa, synthetic construct
  REGION 1..133: note = MG46-48 PI domain
VKFHDRQRIMKNTLTVSDFDDITKDKNLELYDVLLSKLKDSVYCTVYLAPLKLLTEKREKFISLSVELQAELLYNALHLFQCNRVNSDLSLLGGSPNSGIILIQKTVTDKNKECLINQSPTGLFENKIDLKTI

SEQ ID NO: 1433 - protein, 130 aa, synthetic construct
  REGION 1..130: note = MG46-52, MG46-53, MG46-54, MG46-60, MG46-62, MG46-51 PI domain
SKHMLELQKDKRALLPDNQLLKESDMDELYLELCRKLKDSIYQVMLGRFLDTYESGYRRYQELSIEKKAEALYQMLKLFQCTPEMPNLTLIGGNAKPGPIRIGMNVTDRSSLAIVHQSVTGIYEQIERII

SEQ ID NO: 1434 - protein, 130 aa, synthetic construct
  REGION 1..130: note = MG46-55 PI domain
SKHMLELQKDKRALLPDNQLLKEEDMDKLYLELCRKLQESIYRVMLGRFSDTYESGYKRYQELSREKKAEALYQMLKLFQCTPELPNLTLIGGTGTQGAIRIGMNVTDRKSLAIIHQSVTGIYEQIERIV

SEQ ID NO: 1435 - protein, 131 aa, synthetic construct
  REGION 1..131: note = MG46-56 PI domain
SKHIQELQYDMDAAISDNGLLTEQDLDALYIELCEKLKGSVYQTMLGGYIEKYESGYEKYQKLTLEKKAQALWQMLKIFQCTPEMPDLTLIGGSKSQGAIRMGMNVTGRKSLALIHQSVTGIYERVEKIRG

SEQ ID NO: 1436 - protein, 130 aa, synthetic construct
  REGION 1..130: note = MG46-59 PI domain
SKHMLELQKDKRALLPDNQLLKESDMDELYLELCRKLKDSIYQVMLGRFLDTYESGYRRYQELSIEKKAEALYQMLKLFQCTPEMPNLTLIGGNAKPGSIRIGMNVTDRSSLAIVHQSVTGIYEQIERII

SEQ ID NO: 1437 - protein, 131 aa, synthetic construct
  REGION 1..131: note = MG46-63, MG46-64, MG46-61 PI domain
GKHMKELSYDKNARISDNGLLTQDDLDELYRVLCEKLENTVYKIMLHGYIEKYRSGFELYEKLSLEKRAEALWQMLKIFQCTPEMPDLTLIGGSKNQGAIRMGMDISGRESLAIIHQSVTGIYEQIEKIRG

SEQ ID NO: 1438 - protein, 138 aa, synthetic construct
  REGION 1..138: note = MG46-66, MG46-80, MG46-83, MG46-65 PI domain
EKYLSLLKKVKDPEVQENAEILAESLHICKQDNLTLYELLLAKERGSIYRYRPANQAKFLEEKRSIFESLDIKGQCEVLVQIINLFTCTPESANLTKLGGGSSSGIVKFQSQITDKEARLIHQSPTGIFTKSRRVYEI

SEQ ID NO: 1439 - protein, 135 aa, synthetic construct
  REGION 1..135: note = MG46-70 PI domain
LKFNNRKAVQKDAVVTAYDGITDENTLELYDFFADKLSHSIYRKKLSAQADFLDQSKDKFAGLPLEERCEVLGAILHLFQCNAVLSDFHLLGGSRQAGRIYLNKKIKAQDHVCLIVQSVTGFFEKRILLAPYGEK

SEQ ID NO: 1440 - protein, 62 aa, synthetic construct
  REGION 1..62: note = MG46-75 PI domain
VRFCEREKESKKAFTVSGFDGIEKDRNIELFDFFYQKTFKRYFYGPSCGNIEISVGEQEHIC

SEQ ID NO: 1441 - protein, 125 aa, synthetic construct
  REGION 1..125: note = MG46-76 PI domain
LKYNLSEQGEISDEEVSYLYDFFIDKLQNTIYSKKFDGIAKKLSSKRSKFSNLKLKDKCKVLKEVLQLFQCNSSPANLTVLGCADRTGLLTIGKNISEKDHVYLIEQSITGFYEKRILLNPYEGK

SEQ ID NO: 1442 - protein, 138 aa, synthetic construct
  REGION 1..138: note = MG46-81 PI domain
EKYLSLLKKVKDTEVEKNAEILAESLHITRQDNLQLYEQLLAKERDSIYKYRPANQAKFLEEKKSTFESLDIKAQCEVLVQIINLFTCTPESANLEKLEGGSSSGIVKFHSQITDREAKLIHQSPTGIFTKTRRIYEL

SEQ ID NO: 1443 - protein, 138 aa, synthetic construct
  REGION 1..138: note = MG46-82 PI domain
EKYLSLLKKVKAPEIKENAEILAESLHICKQDNLTLYELLLAKERDSIYRYRPANQAKFLEEKRSVFESLDIKGQCAVLVQIINLFTCTPESANLTKLGGGSSSGIVKFQSQIADKEARLIHQSPTGIFTKSRRVYEI

SEQ ID NO: 1444 - protein, 135 aa, synthetic construct
  REGION 1..135: note = MG46-85 PI domain
LKFIHRKTVQKDAVITEYDGVSDDNTLALYDLFVKKLSSSIYRKKYATQADFLCQSKDKFKNLPLEERCEVLGSILHLFQCNPVLSDLHLLGGKKSTGTILLNKKIKPEDHVYLIEQSVTGFFEKRILLAPLGEK

SEQ ID NO: 1445 - protein, 104 aa, synthetic construct
  REGION 1..104: note = MG46-87 PI domain
LKFNQRKQVQKELKITVHDKITEENLINIFETFISKIQTSIYRNKFEASVGLMIKGKGTFIELSMEDKCKCIGEILHLFQCNPVLSDLQLIGGKKASGRIYMGK

SEQ ID NO: 1446 - protein, 135 aa, synthetic construct
  REGION 1..135: note = MG46-88 PI domain
LKFIQRKKVQKNAAITEYDGISDDNTLALYDCFVDKLSSSIYGKEFAMQADFLRQSKNKFTNLSLEERCEVLGSILHLFQCNPVLSDLRLLGGKKSTGTIRLNKKIKPEDHVYLIEQSITGFFEKRILLAPFGEK

SEQ ID NO: 1447 - protein, 138 aa, synthetic construct
  REGION 1..138: note = MG46-90 PI domain
LKFNQRAAMSKKGEEIFINSFDNIQEEDLNRLYHVFEDKLTNQIYKVKLEKQAAVLKKGEETFNRLSPEQKCKLIGEILHLCQCKATHADLRLIGGAKKAGILTMGTQIYPKDHVYLIEQSVTGFFEKRILLAPFGEK

SEQ ID NO: 1448 - protein, 133 aa, synthetic construct
  REGION 1..133: note = MG46-91 PI domain
ESFNRKKTQFRGIAISSEHDGITEENITNLYEALMKKSNSKIFSIRPASQAKLITEKYGTFKKLSLQDKCSVVTSLLDYFGMTGGVSDLKLLGGKSSVGAIKKPGKYNTTNSSIKIVDQSITGLFEEIEEIKA

SEQ ID NO: 1449 - protein, 159 aa, synthetic construct
  REGION 1..159: note = MG46-92 PI domain
EVFMKHYPKFVENELNESEIDYYKFDSNKNLKLYDFFLERLLDNPFCKYARTKNSKSDYEQLNEKRTDFINLSMYKQVVVLFRLFKIFRCNAECAKFEDNFDTNFKIEGNLGEMFGNKKIDIITGKGNGKKSIYILNQSPTGLLEHKAVNLHSEKLKEK

SEQ ID NO: 1450 - protein, 138 aa, synthetic construct
  REGION 1..138: note = MG46-93 PI domain
LKFNQRASLSQKGEEISINSFDNIQEEDLNRLYHVFEDKLTNKIYKVKLGKQAAVLKKGEEMFNRLSPEQKCKLIGEILHLCQCNAKHADLRLIGGAKNAGALTMTTQIYPKDHVYLIEQSVTGFFEKRILLAPFGEK

SEQ ID NO: 1451 - protein, 134 aa, synthetic construct
  REGION 1..134: note = MG46-95 PI domain
VKFHDRQRIMKNTLTVSDFDDISKEKNLELYDVLLSKIKDGVYGIVYSTSLKLLTEKREKFISLSVELQVELLYNELHLFQCNRVNSDLSLLGGSPNSGIILIQKTVTDKNKEYLINQSPTSLFESAPVDLYTI

SEQ ID NO: 1452 - protein, 133 aa, synthetic construct
  REGION 1..133: note = MG46-98 PI domain
VKFTEREKTLRKEIVPRPADGIDKENNLALFDFLSEKLSKTLYNIAYKTQAQLTSGRKETFSNLTEREQVKTLYELLHLFQCNSMLSDLSLIGGPTHTGTLLKSKEITDNDKAEIIYQSPTGLFEHSVDLLTV

SEQ ID NO: 1453 - protein, 138 aa, synthetic construct
  REGION 1..138: note = MG46-99 PI domain
VKAARESMEYERLRGGEGYRPNPRDGLCPEKNLALYDLFVQKMERMPYCQRMSGQRDKLLQARAAFEALDVAQQCCILCQLLNLFSRVGGEADLTGIGLVKNFGILHPSGMISGCAQALLIHQSPTGLYERVVDLNRL

SEQ ID NO: 1454 - protein, 135 aa, synthetic construct
  REGION 1..135: note = MG46-101 PI domain
LKFIHRKTVQKDAAITEYDGVSDDNTLALYDFFVDKLSSSIYGKKFATQADFLRQSKDKFMNLPLEERCEVLGSILHLFQCNAVLSDFHLLGGSRQAGRIYLNKKIKVQDHVYLIEQSVTGFFEKRILLAPFGEK

SEQ ID NO: 1455 - protein, 138 aa, synthetic construct
  REGION 1..138: note = MG46-102 PI domain
VKAARESMEYERLRGGDGYRPNPRDGLCPEKNLALYDLFVQKMERMPYCQRMSGQRDKLLQARAAFEALDVAQQCCILCQLLNLFSRSGERVDLTSIGLVKNFGVLYPSGTISGCKRALLIHQSPTGLYERVIDLNRL

SEQ ID NO: 1456 - protein, 138 aa, synthetic construct
  REGION 1..138: note = MG46-103 PI domain
LKYNERSSSSKGKEALLITPFDNIQEVDLNRLYQVFEDKLTNQVYKVKLGKQASVLKKGEDKFNELPLEVKCRVIGEILHLFQCNAAIADLRLIGGAKNAGALTMNPRVSPEDHVYLIEQSVTGFFEKRILLAPYGEK

SEQ ID NO: 1457 - protein, 138 aa, synthetic construct
  REGION 1..138: note = MG46-120, MG46-149, MG46-104 PI domain
LKFNQRAAMSKKGEEIFINSFDNIQEEDLNRLYHVFEDKLTNQIYKVKLGKQAAVLKKGEETFNRLSPEQKCKLIGEILHLCQCKATHADLRLIGGAKKAGILTMGTQIYPKDHVYLIEQSVTGFFEKRILLAPFGEK

SEQ ID NO: 1458 - protein, 133 aa, synthetic construct
  REGION 1..133: note = MG46-118, MG46-121, MG46-128, MG46-86, MG46-105 PI domain
VRFCEREKESKKAFTVSGFDGIEKDRNIELFDFFTKKLSSDIFMVHHEPTLKSLLANRNIFVDMSVEMQARTIYQILHIFRCNRMLADLTALQGAKSAGIVRMSKRISSKDKTMIINQSPTGLFENSVDLLTV

SEQ ID NO: 1459 - protein, 135 aa, synthetic construct
  REGION 1..135: note = MG46-113, MG46-144, MG46-152, MG46-172, MG46-174, MG46-57, MG46-58, MG46-106 PI domain
LKFNQRKQVQKELKVTVHDKITEENLINIFETFISKIQTSIYRNKFEASVGLMIKGKGTFIELSMEDKCKCIGEILHLFQCNPVLSDLQLIGGKKASGRIYMGKRFDGNKKVFLVLQSVTGFFEKKILLAPYEKK

SEQ ID NO: 1460 - protein, 138 aa, synthetic construct
  REGION 1..138: note = MG46-107 PI domain
VKAARESMEYERLRGGEGYRPNPRDGLCSEKNLALYDLFVQKMERMPYCQRMSGQRDKLLQARAAFEALDVAQQCCILCQLLNLFSRVGGEADLTGIGLVKNFGILHPSGMISGCAQALLIHQSPTGLYERVVDLNRL

SEQ ID NO: 1461 - protein, 135 aa, synthetic construct
  REGION 1..135: note = MG46-116, MG46-117, MG46-127, MG46-133, MG46-135, MG46-137, MG46-145, MG46-148, MG46-176, MG46-71, MG46-73, MG46-79, MG46-96, MG46-97, MG46-108 PI domain
LKFNQRKQVQKELKITVHDKITEENLINIFETFISKIQTSIYRNKFEASVGLMIKGKGTFIELSMEDKCKCIGEILHLFQCNPVLSDLQLIGGKKASGRIYMGKRFDGNKKVFLVLQSVTGFFEKKILLAPYEKK

SEQ ID NO: 1462 - protein, 138 aa, synthetic construct
  REGION 1..138: note = MG46-115, MG46-150, MG46-109 PI domain
LKFNQRAVLSKKGEEISINPFDNIQEEDLNRLYHVFEDKLTNQIYKVKLGKQAAVLKKGEETFNRLSPEQKCKLIGEILHLCQCNATNADLRLIGGAKNAGALTMSTQIYPKDHVYLIEQSVTGFFEKRILLAPFGEK

SEQ ID NO: 1463 - protein, 138 aa, synthetic construct
  REGION 1..138: note = MG46-124, MG46-157, MG46-110 PI domain
LKYNERSSSSKGKEALLITPFDNIQEVDLNRLYQVFEDKLTNQVYKVKLGKQASVLKKGEGKFNELPLEVKCRVIGEILHLFQCNAAIADLRLIGGAKNAGALTMNPRVSSEDHVYLIEQSVTGFFEKRILLAPYGEK

SEQ ID NO: 1464 - protein, 135 aa, synthetic construct
  REGION 1..135: note = MG46-111 PI domain
LKFNQRKQVQKELKVTVHDKITEENLINIFETFISKIQTSIYRNKFKKFVSLMIKEKGTFIELSMEDKCKCIGEILHLFQCNPVLSNLQLIGGEKASGKISMGKKFDGNEKVFLILQSVTGFFEKKILLAPYEKK

SEQ ID NO: 1465 - protein, 138 aa, synthetic construct
  REGION 1..138: note = MG46-112 PI domain
LKFNQRASLSKKGEEISINSFDNIQEEDLNRLYHVFEDKLTNKIYKVKLGKQAAVLKKGEEMFNRLSPEQKCKLIGEILHLCQCNAKHADLRLIGGAKNAGALTMTTQIYPKDYAYLIEQSVTGFFEKRILLAPFGEK

SEQ ID NO: 1466 - protein, 133 aa, synthetic construct
  REGION 1..133: note = MG46-134, MG46-140, MG46-155, MG46-77, MG46-89, MG46-114 PI domain
VRFCEREKESKKAFTVSGFDGIEKDRNIELFDFFTKKLSSDIFMVHHAATLKSLLANRSIFVDMSVEMQARTIYQILHIFRCNRMLADLTALQGAKSAGTVLMSKKISLNDKIMIINQSPTGLFENSVDLLTV

SEQ ID NO: 1467 - protein, 138 aa, synthetic construct
  REGION 1..138: note = MG46-119 PI domain
VKAARESMEYERLRGGDGYRPNPRDGLCLEKNLELYNLFVQKMERMPYCQRMSGQRDKLLQARAAFEALDVAQQCCILCQILNLFSREGGEADLTGIGLVKNFGILHPSGMISGCAQALLIHQSPTGLYERVVDLNRL

SEQ ID NO: 1468 - protein, 138 aa, synthetic construct
  REGION 1..138: note = MG46-72, MG46-122 PI domain
VKAARESMEYERLRGGDGYRPNPRDGLCPEKNLALYDLFVQKMERMPYCQRMSGQRDKLLQARAAFEALDVAQQCCILCQLLNLFSRVGGEADLTGIGLVKNFGILHPSGMISGCAQALLIHQSPTGLYERVVDLNRL

SEQ ID NO: 1469 - protein, 134 aa, synthetic construct
  REGION 1..134: note = MG46-84, MG46-123 PI domain
ESFFKKSEKNKDLQPTPKFDKISTENTLDLYCELQKKSKSPIYNKRPGNQSDVLENGVSLFEKLSLLERCKAIREILNYYAMEGNGQSDFTAIGGSKTCGKLTKKAGFDITKSNILIFDQSITGLFEEIEEIKA

SEQ ID NO: 1470 - protein, 133 aa, synthetic construct
  REGION 1..133: note = MG46-125 PI domain
VRFCEREKENKKEFSISGFDGIETDKNVKLFDSLAVKLSNKLYSVHYAKTAKSLLSNRESFVVLSAEMQTRTIYQMLHIFQCNRMCANLEPIHGVKNAGTVLMPKKVSFSDKTLIINQSPTGLFENSVDLLTV

SEQ ID NO: 1471 - protein, 138 aa, synthetic construct
  REGION 1..138: note = MG46-126 PI domain
LKFNQRAVLSKKGEEISVNPFDNIQEEDLNRLYHVFEDKLTNQIYKVKLGKQAAVLKKGEETFNRLSPEQKCKLIGEILHLCQCNATNADLRLIGGAKNAGALTMSTQIYPKDHVYLIEQSVTGFFEKRILLAPFGEK

SEQ ID NO: 1472 - protein, 135 aa, synthetic construct
  REGION 1..135: note = MG46-129 PI domain
LKFIHRKTVQKDAVITEYDGVSDDNTLALYDFFVDKLSSSIYGKKFATQADFLRQSKDKFTNLSLEERCEVLGSILHLFQCNAVLSDFHLLGGSRQAGRIYLKKNIKAQDHVYLIEQSVTGFFEKRILLAPFGEK

SEQ ID NO: 1473 - protein, 135 aa, synthetic construct
  REGION 1..135: note = MG46-139, MG46-130 PI domain
LKFNQRKQAQKELKITVHDKITEENLINIFETFISKIQTSIYRNKFEASVGLMIKGKGTFIELSMEDKCKCIGEILHLFQCNPVLSDLQLIGGKKASGRIYMGKRFDGNKKVFLVLQSVTGFFEKKILLAPYEKK

SEQ ID NO: 1474 - protein, 133 aa, synthetic construct
  REGION 1..133: note = MG46-131 PI domain
VRFCEREKESKKEFTVSGFDGIEKDRNIELFDFFTKKLSSDIFMVHHAATLKSLSESRNIFVDMSVEMQARTICQILHIFRCNRMLADLTALQGAKNAGTVLMSKKISPNDKTMIINQSPTGLFENSVDLLTV

SEQ ID NO: 1475 - protein, 131 aa, synthetic construct
  REGION 1..131: note = MG46-132 PI domain
SKHIQELQYDKDAAVSDNGLLTEQDLDALYTELCEKLKGSVYQTMLGGYIEKYESGYEKYQKLTLEKKAQALWQMLKIFQCTPEMPDLTLIGGSKSQGAIRMGMNVTGRKSLALIHQSVTGIYERVEKIRG

SEQ ID NO: 1476 - protein, 138 aa, synthetic construct
  REGION 1..138: note = MG46-143, MG46-136 PI domain
LKFNQRAAMSKKGEEISINSFDNIQEEDLNRLYHVFEDKLTNQIYKVKLGKQAAVLKKGEETFNLLTPEQKCKLIGEILHLCQCNATHADLHLIGGAKEAGALTMSTQINPKDHVYLIEQSVTGFFEKRILLAPFGEK

SEQ ID NO: 1477 - protein, 135 aa, synthetic construct
  REGION 1..135: note = MG46-94, MG46-141 PI domain
LKFIHRKTVQKDAVITEYDGVSDDNTLALYDFFVDKLSSSIYGKKFATQADFLRQSKDKFMNLPLEERCEVLGSILHLFQCNAVLSDFHLLGGSRQAGRIYLNKKIKAQDHVYLIEQSVTGFFEKRILLAPFGEK

SEQ ID NO: 1478 - protein, 135 aa, synthetic construct
  REGION 1..135: note = MG46-78, MG46-142 PI domain
LKFIQRETVQKNAAITEYDGISNDNTSELYDFFVDKLSNSIYGKKFAAQADFLRQSKDKFMNLLLEERCEVLGSILHLFQCNPVLSDLRLLGGKKSTGTILLNKKIKPEDHVYLIEQSVTGFFEKRILLAPFGEK

SEQ ID NO: 1479 - protein, 135 aa, synthetic construct
  REGION 1..135: note = MG46-69, MG46-146 PI domain
LKFNQRKQVQKELKVTVHDKITEENLINIFEAFISKIQTSIYRNKFKKFVSLMIKEKGTFIELSMEDKCKCIGEILHLFQCNPVLSNLQLIGGEKASGKISMGKKFDGNEKVFLILQSVTGFFEKKILLAPYEKK

SEQ ID NO: 1480 - protein, 135 aa, synthetic construct
  REGION 1..135: note = MG46-147 PI domain
LKFNNRKAVQKDAVVTAYDGITDENTLELYDFFADKLSHSIYRKKLSAQADFLDQSKDKFAGLPLEERCEVLGAILHLFQCNAVLSDFHLLGGSRQAGRIYLNKKIKAQDHVYLIEQSVTGFFEKRILLAPYGEK

SEQ ID NO: 1481 - protein, 135 aa, synthetic construct
  REGION 1..135: note = MG46-153 PI domain
LKFIHRKTVQKDAVITEYDGVSDDNTLALYDFFVDKLSSSIYGKKFATQSDFLRQSKDKFMNLPLEERCEVLGSILHLFQCNAVLSDFHLLGGSRQAGRIYLNKKIKAQDHVYLIEQSVTGFFEKRILLAPFGEK

SEQ ID NO: 1482 - protein, 138 aa, synthetic construct
  REGION 1..138: note = MG46-154 PI domain
LKYNERASSPKRKDALLIGPFDNIREVDVNRLYQVFEDKLTNQVYKVKLGKQASVLKKGEGKFNELPLEVKCRVIGEILHLFQCNAAIADLRLIGGAKNAGALTMNPRVSPEDHVYLIEQSVTGFFEKRILLAPYGGK

SEQ ID NO: 1483 - protein, 135 aa, synthetic construct
  REGION 1..135: note = MG46-156 PI domain
LKFIHRKTVQKDAAITEYDGVSDDNTLALYDFFVDKLSSSIYGKKFATQADFLRQSKDKFTNLPLEERCEVLGSILHLFQCNAVLSDFHLLGGSRQAGRIYLNKKIKAQDHVYLIEQSVTGFFEKRILLAPFGEK

SEQ ID NO: 1484 - protein, 138 aa, synthetic construct
  REGION 1..138: note = MG46-159 PI domain
IRFCERAAISQKLHPNQPIQVNAMDGISQEENISAYVELWQKMEKLHGRLLKRLVNKLKNAQPAFQHLNIERQCYVLKQILQLWTESSSQTADLRDIGLSKDTGAISINSKISEYSEVTLFLQSVTGLFDEPVNLLKP

SEQ ID NO: 1485 - protein, 138 aa, synthetic construct
  REGION 1..138: note = MG46-160 PI domain
VRFCERAATAQKFHPDQPIQVNAMDGLSAEGNLAAYIALYEKLEKLHGRILSDLVKKLKEAQPAFQQQNMARQCYVLKQILRLWSASSRQTADLKDVGLSGHTGTIRVNSRISEYSEVLLIFQSVTGLFEEAVDLLKI

SEQ ID NO: 1486 - protein, 134 aa, synthetic construct
  REGION 1..134: note = MG46-161 PI domain
EKAFQLKQKNKLSYLPYNRNEISSEYNIMLYDFLTMKAGNPSYINRPSCQCGVLQKGHEKFEGLSIDEQLNVLQNIIRYFSSAPGMNDFSAIGGSANAGQLKFSKTVRTKGAGPKFVVIHQSITGLFEKRTVVK

SEQ ID NO: 1487 - protein, 134 aa, synthetic construct
  REGION 1..134: note = MG46-162 PI domain
EKAFQLKQKNKLSYLPYNRNEISSEYNIMLYDFLTMKAGNPSYINRPSCQCGVLQKGHEKFEGLCIDEQLNVLQNIIRYFSSAPGMNDFSAIGGSANAGQLKFSKTVRTKGAGPKFVVIHQSITGLFEKRTVVK

SEQ ID NO: 1488 - protein, 163 aa, synthetic construct
  REGION 1..163: note = MG46-167, MG46-163 PI domain
LKFTERFRIATAKAKKDKNSGPLDVALQLTSYDWTKSGRNTELTPEKAAEMREKDLIHLYDVFLNKLTSFYGRAFHAQISVLQNGREKYEGLPPEWKCVVLSEILHLFQCDRVLADLTLIGGSSQAGALKFSKNLKPDNQPMLITQSVTGFFEKKISLAPYRK

SEQ ID NO: 1489 - protein, 125 aa, synthetic construct
  REGION 1..125: note = MG46-164 PI domain
LKYNLLEQGEISDEEVLYLYDFFIDKLQNTIYSKKFDGIAKKLSSKRSKFSSLKLKDKCKVLKEVLQLFQCNSSSANLTALGCADRTGLLTIGKNISEKDHVYLIEQSITGFYEKRILLNPYEGK

SEQ ID NO: 1490 - protein, 167 aa, synthetic construct
  REGION 1..167: note = MG46-169, MG46-165 PI domain
LKFVTRLQTAESLVKHSNNKKNESKSEPAIKLTSFDWTEENRIKTISLAEAEKQRNQDMLQLYDVFLDKLSNGIYGKRLGKQADVLSNGRETFVEMIPEEKCKLLAEILHLFQCGRVPANLKPIGGAASAGLHIMNKRLDPKEHPELIVQSVTGFFEKKIPLAPYRK

SEQ ID NO: 1491 - protein, 131 aa, synthetic construct
  REGION 1..131: note = MG46-166 PI domain
DKVAERIREDKNYKVDEHDGITDDDMVRIYDTLYEKTKGIYKKRHSSQISILENGRETFVSMTIEDKIKQLLEILHLFQCNAVSSDLSKIGGASRAGVLVVGNEVSKYSDVRLITQSPTGLFEKEIDLLTV

SEQ ID NO: 1492 - protein, 131 aa, synthetic construct
  REGION 1..131: note = MG46-168 PI domain
EKTMDKMKENKKYIMNEHDKITDADLVEVYDTLSLKLHTIYAKRQSAQISILEGGREKFLLLSPEDKCRQIAEILHLFQCNTVTSDLSKIGGASNAGDLKVGNKVSRYSEAKIIAQSPTGLFEQEIDLLTI

SEQ ID NO: 1493 - protein, 131 aa, synthetic construct
  REGION 1..131: note = MG46-170 PI domain
DKVLDRIQDNKKYVIDNHDNIDENDLICLYDTLFGKLNKIYKKRHSVQLPVVESGREKFLEMDITAKCKFIREFLHLFQCNAVASDLSGIGGASHAGVLVIGNEISKLSDVRLITQSSTGLFETEIDLLTV

SEQ ID NO: 1494 - protein, 141 aa, synthetic construct
  REGION 1..141: note = MG46-171 PI domain
ARQPEEDKEAEAKPRGAFTPEDFLALYDHFTNKLGNEPYSRFSAFTNQHRNLSGSRENFIRLTPFEQTKVLGQILTLFLCDGRTSDLSLLQPKNPDGSPSTKNKQSGMLLISQNLQQGVQVIVRNYSCTGLFLSKTPLSLP

SEQ ID NO: 1495 - protein, 133 aa, synthetic construct
  REGION 1..133: note = MG46-173 PI domain
TSFVERLKTDKDLKINAQYDKITAAENLKLYDLLLEKNNNKIYALRPASQIKVLQEGREKFNLLSLEQQCQLILQILLLTKCAFVRADLKLLGGAGQAGTVKKNKNISDYQKAKIINESPTGFYSQEIDLLKL

SEQ ID NO: 1496 - protein, 141 aa, synthetic construct
  REGION 1..141: note = MG46-177, MG46-178, MG46-179, MG46-175 PI domain
TRQAEEGKDAEADPRAVYPPEENLALYDHFTQKLGSEPYSRLSVFVNQYRNLSASRGNFILLTPFEQMKVLGQILILFLCDGRTSDLSLLQPKNPNGTPSSKNKQSGMVTISQNLQKGIKVDVLNFSCTGLFLSRTPLSQP

SEQ ID NO: 1497 - protein, 138 aa, synthetic construct
  REGION 1..138: note = MG46-180 PI domain
EKYLSLLKKVKASEVLENAEILAEDLEITREANLALYDLLLAKERDSIYRNRPANQAKLLTTKQSLFTTLDIKTQCEVLVQILNLFTCTPESADLKVIGGGGRTGIVLFQSQIKDTNAQLIHRSPTGIFSKSVRVYDL

SEQ ID NO: 1498 - protein, 151 aa, synthetic construct
  REGION 1..151: note = MG71-1 PI domain
LKHETDIAEKEKTLADQNADDIQKQKAQKGLDFYEQKWGISGAVNVQLYDMFIAKSANNLYKNRPASQTITLKEKREHFVKLTLSKQIHIIKEILNLFKCASASADFKLIDKGTSCGTLKISNNITKLKECILINQSPTGVFEQEVDLMKL

SEQ ID NO: 1499 - protein, 151 aa, synthetic construct
  REGION 1..151: note = MG71-26 PI domain
LKYENDIAENELVIADKNSDDIQKQQAQKNLDYYNQKWRIGIKVNMHIYDMLLAKSGNNLYKNRPASQTTDLQEQREFFEKLSLANQIHVIGEVLKLFKCASASANLKLLDKGNACGVIKVSNNILKFKQCVLINQSPTGVFEQEVDLMKL

SEQ ID NO: 1500 - protein, 136 aa, synthetic construct
  REGION 1..136: note = MG73-1 PI domain
DVFYKNGTYFLVPVYTIDFTKEKLPLISIPDNQPMDVRDFRFSLYKDDYVQIKNKTGETFEGYFKQYNAQTGQIYLETHDRSDSYTVSGKPASEKKFSKSTFVDFTKYQIDILGNQHRVEKEKYTGITRKNKGFGG

SEQ ID NO: 1501 - protein, 136 aa, synthetic construct
  REGION 1..136: note = MG73-3, MG73-4, MG73-5, MG73-7, MG73-2 PI domain
DVFLEDGQYYVVPVYTMDFAKGVLPLVAQPSGRLMKKENFVFSLYKDDYVNLVNKQGETWEGYFKQLNAQTGQIYLESHDRSAQYTVSGKPSNQKKIASSTLKLIEKYQIDIFGGKHLVKKEKYIGIIRKNKGFGG

SEQ ID NO: 1502 - protein, 136 aa, synthetic construct
  REGION 1..136: note = MG73-6 PI domain
DVFLEDGQYYVVPVYTMDFAKGVLPLVAQPSGRLMKKENFVFSLYKDDYVNLVNKQGETWEGYFKQYDATTSQIHLESHDRSAQYTVSGQLTNKKKIASSTLKLIEKYQIDIFGGKHLVKKEKYIGIIRKNKGFGG

SEQ ID NO: 1503 - protein, 136 aa, synthetic construct
  REGION 1..136: note = MG73-8 PI domain
DVFLEDGQYYVVPVYTMDFAKGVLPLVAQPSGRLMKKENFVFSLYKDDYVNLVNKQGEIWEGYFKQLNAQTGQIYLESHDRSAQYTVSGKPSNQKKIASSTLKLIEKYQIDIFGGKHLVKKEKYIGIIRKNKGFGG

SEQ ID NO: 1504 - protein, 136 aa, synthetic construct
  REGION 1..136: note = MG73-9 PI domain
DVFLEDGQYYVVPVYTMDFAKGVLPLVAQPSGRLMKKENFVFSLYKDDYVNLVNKQGETWEGYFKQLNAQTGQIYLESHDRSAQYTVSGKLSNQKKIASSTLKLIEKYQIDIFGGKHLVKKEKYIGIIRKNKGFGG

SEQ ID NO: 1505 - protein, 136 aa, synthetic construct
  REGION 1..136: note = MG73-10 PI domain
DVFYKNGKYYLVPIYTIDFAKQELPLLSVPDNVPMDPKDFIFSLYKDDYIELKNKNGETYEGYFSQYNAQSGQIYLESHDRSATYTVSGKPSSEKKLNKNTFISFTKYQIDILGGKHAIKKEKYVGIRRKNKGFGG

SEQ ID NO: 1506 - protein, 128 aa, synthetic construct
  REGION 1..128: note = MG74-12, MG74-13, MG74-16, MG74-17, MG74-19, MG74-22, MG74-26, MG74-3, MG74-31, MG74-32, MG74-36, MG74-4, MG74-1 PI domain
DIYSRDGKFYMVPVYAKDVADKRLPLRACVAAKAEKDWREMTADYRFLFSLTPDCYVLTENRKGEVKEGYFAGANRNTSAISLSLAHDKQNVIQGIGITTLKRFEKYRVDRFGRLSLVRREADPRGRS

SEQ ID NO: 1507 - protein, 128 aa, synthetic construct
  REGION 1..128: note = MG74-2 PI domain
DIYSRDGKFYMVPVYAKDVADKRLPLRACVAAKAEKDWREMTADYRFLFSLTPDCYVLTENRKGEVKEGYFVGSDRSTAAISLSLAHDRQQSLRGIGITTLKRFEKYRVDRFGRLSPVRREADPRGRS

SEQ ID NO: 1508 - protein, 128 aa, synthetic construct
  REGION 1..128: note = MG74-6 PI domain
DIYSRDGKFYMVPVYAKDVADKRLPLRACVAHKDEKDWREMTADYRFLFSLTPDCYVLTENRKGEVKEGYFAGANRNTSAISLSLAHDKQNVIQGIGITTLKRFEKYRVDRFGRLSPVRREADPRGRS

SEQ ID NO: 1509 - protein, 128 aa, synthetic construct
  REGION 1..128: note = MG74-11 PI domain
DIYSRDGKFYMVPVYAKDVADKRLPLRACVAAKAEKDWREMTADYRFLFSLTPDCYVLTENRKGEVKEGYFAGANRNTSAISLSLAHDKQNVIQGIGITTLKRFEKYRVDRFGRLSPVRREADPRGRS

SEQ ID NO: 1510 - protein, 128 aa, synthetic construct
  REGION 1..128: note = MG74-25, MG74-48, MG74-15 PI domain
DIYSRDGKFYMVPVYAKDVADRRLPLRACVAAKAEKDWREMTADYRFLFSLTPDCYVLTENRKGEVKEGYFIGSDRSTAAISLSLAHDRQQSLRGIGITTLKRFEKYRVDRFGRLSPVRREADPRGRS

SEQ ID NO: 1511 - protein, 128 aa, synthetic construct
  REGION 1..128: note = MG74-27, MG74-18 PI domain
DIYSRDGKFYMVPVYAKDVADRRLPLRACVAAKAEKDWREMTADYRFLFSLTPDCYVLTENRKGEVKEGYFIGSDRSTAAISLSLAHDRQQSLRGIGITTLKRFEKYRVDRFGRLSSVRREADPRGRS

SEQ ID NO: 1512 - protein, 128 aa, synthetic construct
  REGION 1..128: note = MG74-34, MG74-38, MG74-43, MG74-44, MG74-45, MG74-9, MG74-20 PI domain
DIYSRDGKFYMVPVYAKDVADKRLPLRACVAHKDEKDWLELTEDYHFLFSLTPDCYVLTENRKGEVKEGYFEGPDRGSANISLSLAHDKKNTIRGIGIQNLKRFEKYRVDRFGRLSLVRREADPRGRS

SEQ ID NO: 1513 - protein, 103 aa, synthetic construct
  REGION 1..103: note = MG74-21 PI domain
DIYSRDGKFYMVPVYAKDVADKRLPLRACVAAKAEKDWREMTADYRFLFSLTPDCYVLTENRKGEVKEGYFAGANRNTSAISLSLAHDKQNVIQHRHHHVKAF

SEQ ID NO: 1514 - protein, 128 aa, synthetic construct
  REGION 1..128: note = MG74-33, MG74-24 PI domain
DIYSRDGKFYMVPVYAKDVADKRLPLRACVAAKAEKDWREMTADYRFLFSLTPDCYVLTENRKGEVKEGYFAGANRNTSAISLSLAHDKQHVIQGIGITTLKRFEKYRVDRFGRLSLVRREADPRGRS

SEQ ID NO: 1515 - protein, 128 aa, synthetic construct
  REGION 1..128: note = MG74-7, MG74-30 PI domain
DIYSRDGKFYMVPVYAKDVADKRLPLRACVAHKDEKDWPEMTADYRFLFSLTPDCYVLTENRKGEIKEGYFSGADRSSANISLTLAHDRKSSIRGIGIQKLRRFEKYRVDRFGRLSPVRREADPRGRS

SEQ ID NO: 1516 - protein, 128 aa, synthetic construct
  REGION 1..128: note = MG74-37 PI domain
DIYSRDGKFYMVPVYAKDVADKRLPLRACVAAKAEKDWREMTADYRFLFSLTPDCYVLTENRKGEVKKGYFAGANRNTSAISLSLAHDKQNVIQGIGITTLKRFEKYRVDRFGRLSLVRREADPRGRS

SEQ ID NO: 1517 - protein, 128 aa, synthetic construct
  REGION 1..128: note = MG74-41, MG74-40 PI domain
DIYSRDGKFYMVPVYAKDVADKRLPLRACVAHKDEKDWLELTEDYHFLFSLTPDCYVLTENRKGEVKEGYFEGPDRGSANISLSLAHDKKNTIRGIGIQNLKRFEKYRVDRFGRLSLVRREADPRGRP

SEQ ID NO: 1518 - protein, 128 aa, synthetic construct
  REGION 1..128: note = MG74-49 PI domain
DIYSRNGKFYMVPVYAKDVADKRLPLRACVAAKAEKDWREMTADYRFLFSLTPDCYVLTENRKGEVKEGYFAGANRNTSAISLSLAHDKQNVIQGIGITTLKRFEKYRVDRFGRLSLVRREADPRGRS

SEQ ID NO: 1519 - protein, 128 aa, synthetic construct
  REGION 1..128: note = MG74-50 PI domain
DIYSRNGKFYMVPVYAKDVADKRLPLRACVAHKDEKDWLELTEDYHFLFSLTPDCYVLTENRKGEVKEGYFEGPDRGSANISLSLAHDKKNTIRGIGIQNLKRFEKYRVDRFGRLSLVRREADPRGRL

SEQ ID NO: 1520 - protein, 136 aa, synthetic construct
  REGION 1..136: note = MG86-1 PI domain
RAFKKDKKLEYKRIDVSNFEKIKKSNDGSFKVYKNDIVFFVFDEEKYKGGKIVSFLEDKKMAAFSNPKYPANIQAQPESFLTIFKGKANSHKQVSVGKAKGIIKLKVDILGNIESYQVLGNAKSKLLDEIKSIVSH

SEQ ID NO: 1521 - protein, 136 aa, synthetic construct
  REGION 1..136: note = MG86-2 PI domain
KAQIINGKLNYTRIDVANIDKIKKENDNSFKVYKNDLVFFIYTDGTNKGGKIVSFLEDKRIAAFSNPRFPSSIGFQPHFFVTIFNGKANSHKQHSLNKAIGIIKLNLDILGNIKSYQKIGSCESELLEFIKKVIKD

SEQ ID NO: 1522 - protein, 138 aa, synthetic construct
  REGION 1..138: note = MG86-4, MG86-3 PI domain
KTYLEKDKLKYNRIDISNTQKINGKFVVYSKGFKVFKNNLVFFIFSDGTYKGGKIVSFLADKGIAAFSNSKFPASIANQPHSFLTFFNGKPNSHKQHSINKAIGLIKLDLDILGNIKSQQTIGNVQSKLFDFIKEILK

SEQ ID NO: 1523 - protein, 139 aa, synthetic construct
  REGION 1..139: note = MG86-8 PI domain
KAVLEKEKLVYERIDASNFKRIKKENDASFKVFKNDVVFFVFSDNTFRGGKLVSFLEDGTIASFQNPRYPAAVQFQPSLFCILGKDKEGNPKKSSSKQYKNGKAIGIIKLNLDILGNIKSYSKFGEVSQEVEKSIFHKE

SEQ ID NO: 1524 - protein, 134 aa, synthetic construct
  REGION 1..134: note = MG86-10 PI domain
KATLKNKKLGYERIDASNFRKIQKINDGSFKVYKNDVVFFVYEDDNFKGGKIVSFLEDKKMGSFSNPRYPASIKFQPHSFLTLFKGVPNSHKQHSLNKAIGIIKLNLDILGNIKSYSKFGEVSKEVELKIFYKE

SEQ ID NO: 1525 - protein, 134 aa, synthetic construct
  REGION 1..134: note = MG86-12 PI domain
RATSNNEKLFYERIDASNFKRIQKENDGSFKVYKNDVVFFIYEDEIFKGGKIVSFLEDKKIASFSNPRYPASIKFQPHSFLTLFKGIPNSHKQYSLNKAIGIIKLNLDILGNIKSYSKFGVVSKEVELKIFHKE

SEQ ID NO: 1526 - protein, 137 aa, synthetic construct
  REGION 1..137: note = MG86-13 PI domain
QSWLENEKLHYKRIDVANFKKIKKQNDGNFQVFKNDIVFFVYPNGSFRGGKIVSFLEENKTGAFQNSKFPMSLKYQPEIFCELNKEKKHVKTKPRSIGKSTGIIKLNLDIIGNIKSYTCIGKIESEILDFIKASVNG

SEQ ID NO: 1527 - protein, 134 aa, synthetic construct
  REGION 1..134: note = MG86-14 PI domain
KAELKDDKLCYERIDVANFNTIKKENDKSFKAYKNDVIFFMYGDGSFRGGKIVSFLEDKKIAAFSNPKFPVSYKFQPDSFCKDKAHTGAKQHALNKAIGIIKLNLDITGKIKSYQSIGTIESELLQFIKEAIHG

SEQ ID NO: 1528 - protein, 133 aa, synthetic construct
  REGION 1..133: note = MG86-15 PI domain
SAILNGKKIKYKRIDVANFESMKKVDGFKVYKNDVVFFIYPDGSFNGGKIVSFLEDKKMASFSNPRFPANIGLQPHSFVTLFKGKANSHKQHSLNKAIGIIKLNLNVLGNIKSFSSMDEVDGELLEFLKGLKG

SEQ ID NO: 1529 - protein, 133 aa, synthetic construct
  REGION 1..133: note = MG86-16 PI domain
SAILNGKKIKYKRIDVANFESMKKVDGFKVYKNDVVFFIYPDGSFKGGKIVSFLEDKKMASFSNPRFPANIGLQPHSFVTLFKGKANSHKQHSLNKAIGIIKLNLNVLGNIKSFSSMDEVDGELLEFLKELKG

SEQ ID NO: 1530 - protein, 136 aa, synthetic construct
  REGION 1..136: note = MG86-17 PI domain
RTWLKEGKLNYERIDVANLQKIEKLNDSSFKVYKNDEIFFIMPDGSRRGGKIVSFLEETKKSAFQNAKYPTSSEYQPMPFCKMNKGKKSGAKQQSIGKAIGIIKLNLDIIGNIKSYQVIGDAKSDFLDFVKESIRG

SEQ ID NO: 1531 - protein, 139 aa, synthetic construct
  REGION 1..139: note = MG86-18 PI domain
RAYKEDSKLEYERIDVANVEKIQKTNDGSFKAYKNDIVFFIYNDGSFKGGRVVSYIKKSSGSKLCAFLNPRFPTASEYQPSSFCKIEKGKHSGAKQQSIGSAKGIIKLNLDTLGNIKSYQVLGNVESKILDEIKSIVSH

SEQ ID NO: 1532 - protein, 135 aa, synthetic construct
  REGION 1..135: note = MG86-19 PI domain
KATLKDSKLKYTRIDVANFEKIQKENTDSFKVFKNDLVFFIYSDGSFRGGKIVSFLEEKGMGAFSNSRFPASIGLQPHSFLTMFNGKANSHKQISLNKAIGIIKLNIDIIGNIKSYQVIGDVKGELLEFIKKLTQ

SEQ ID NO: 1533 - protein, 133 aa, synthetic construct
  REGION 1..133: note = MG86-20 PI domain
SAILNGKKIKYKRIDVANFESMKKVDGFKVYKNDVVFFIYPDGSFKGGKIVSFLEDKKMASFSNPRFPANIGLQPHSFVTLFKGKANSHKQHSLNKAIGIIKLNLNVLGNIKSFSSMGEVDGELLEFLKGLKG

SEQ ID NO: 1534 - protein, 141 aa, synthetic construct
  REGION 1..141: note = MG86-22 PI domain
RAIKKGEKLEYERIDVSNFEKIKKSNDGSFKVYKNDIVFFIFDEENFKGGKIVSFLEDKTIASFSNPRFPAAIKFQPDSFCIIGKDSNGKPKKSSSKQYKLGKAKGIIKLKIDILGNIESYQVLGNAKSKLLDEIKSIVSH

SEQ ID NO: 1535 - protein, 134 aa, synthetic construct
  REGION 1..134: note = MG86-23 PI domain
KAIKGDKKIEYKRVDASNFQKIKKENDGSFKVYKNDIVFFIFSDATYKGGRVVSFLEDKKIVAFSNPRFAPNAKSQPISFVTIFKGEPYSHKQHSINKAIGIIKINLDILGNIKSYQKFGEVSKEIEAKILHME

SEQ ID NO: 1536 - protein, 135 aa, synthetic construct
  REGION 1..135: note = MG86-24 PI domain
RAIKKGEKLEYERIDVSNFEKMKKSNDGSFKVYKNDIVFFIFDEENYKGGKIVSFLDDKKMAAFSNPKYPANTQSQPESFLTMFQGKPKSHKQVSIGKAKGIIKLKVDILGNIESYQVLGDARSKILDDIKKYSE

SEQ ID NO: 1537 - protein, 147 aa, synthetic construct
  REGION 1..147: note = MG86-26 PI domain
KSWLKDENLHYERIDVANIDTVKKENDSSFKVYKNDLVFFIYPDGSFRGGKIVSFLEENKTGAFQNSKFPMALKYQPSSFCEVDKQGKHTKTKPKSIGKAIGIIKLNLDIVGNIKSYQNIGNVNSECLEFLKENTDGWESSSSHKTL

SEQ ID NO: 1538 - protein, 136 aa, synthetic construct
  REGION 1..136: note = MG86-27 PI domain
RAWLEDDKLHYVRIDVANFKKIQKLNDSSFKVYKNDEIFFIMPDGSRRGGKIVSFLEETKKSAFQNAKYPTSSEYQPMQFCKMDKGKKSGAKQQSIGKAIGIIKLNIDIIGNIKSYQVIGNAESELLDFVKETVHG

SEQ ID NO: 1539 - protein, 141 aa, synthetic construct
  REGION 1..141: note = MG86-28 PI domain
RAWLESDKLQYERIDVANFDTIKKKFDNSFRVFKNDVVFFVYPDGSFRGGKIVSFLDDKGIASFSNPKYPSLSEHQPKSFCKMGKDNNGNPKKSGAKQQNINASIGLIKLSLDIIGNIKSYQVTGNAESELLRFIKDVKNG

SEQ ID NO: 1540 - protein, 133 aa, synthetic construct
  REGION 1..133: note = MG86-29 PI domain
SATLNGDKIEYKRIDVANFETIKKDAGFKVYKNDIVFFIYPDGSFKGGKIVSFLEEKNVASFSNLRYPANINLQPHSFVTLFKGKANSHKQHSINKAIGIIKLHLDIIGNIKSFSSLGEVDSELLSFLKKLKD

SEQ ID NO: 1541 - protein, 136 aa, synthetic construct
  REGION 1..136: note = MG86-30 PI domain
RAYKENEKLEYERIDIANIEKIQKVNDGSFKAYKNDVVLFIFDDKVYKGGKIVSFLEEKKMAAFSNPKYPANIQSQPESFLTMFNGKANSHKQVSISKAKGIIKLYIDILGNIKSYQVLGNAKSKILDEIKSIVSH

SEQ ID NO: 1542 - protein, 137 aa, synthetic construct
  REGION 1..137: note = MG86-34, MG86-38, MG86-32 PI domain
KASLKNDKLFYERIDVANKNNIKDNDFLIIRNNLICINFKNKNLLGFVESFDENTNKIRMYDSRYPKRLENQPERFKVASGKGRKEFGIAGAIGIIKLNLDILGNINSYQIIGTIQNELYSFFKKLKNDKGNLPINT

SEQ ID NO: 1543 - protein, 133 aa, synthetic construct
  REGION 1..133: note = MG86-41 PI domain
KAELENDKLNYKRIDVANRDTMQKEDNNSFSLKVFKNDLVFFIYPEGSFRGGKIVSFLNDKNLGAFQNSRFPTSLKYQPDSYCKDKAHTGAKQHSLNKAIGIIKLNLDILGNIKSYQKTGQCESELLNFIKAV

SEQ ID NO: 1544 - protein, 139 aa, synthetic construct
  REGION 1..139: note = MG86-43 PI domain
RAYKENEKLEYERIDIANIEKIQKVNDGSFKAYKNDVVLFIYNDGSFKGGRVVSYIKKSSGSQLCAFLNPKFPTASEYQPSSFCKIEKGKHSGAKQQSIGSAKGIIKLNLDILGNIKSYQILGNAKSKILDEIKNIVSH

SEQ ID NO: 1545 - protein, 135 aa, synthetic construct
  REGION 1..135: note = MG86-44 PI domain
KSWMKDEKLNYERIDVANFNQIKKEKNNNFKVYKNDIVFFVYPDSSFRGGKIMSLLEESRVASFSNSKYPALVKSQPLSFINISKGKAVNHKQHAISKATGIIKLNLDILGNIKSYQIIGNAKSELLDFIKDTLQ

SEQ ID NO: 1546 - protein, 136 aa, synthetic construct
  REGION 1..136: note = MG86-45 PI domain
KASVENDKLKYERIDVANFQKTKKENDNSFKVFKNDLVFFVYPDGSFKGGKIVSFLEDKKMCAFSNPRFPASIRLQPHSFLTIFKGKANSHKQQSVNKAIGIIKLNLDILGNIKSYKIIGEIQSELFEFIEGIKNG

SEQ ID NO: 1547 - protein, 136 aa, synthetic construct
  REGION 1..136: note = MG86-46 PI domain
KAILENGKFLYERIDVINFAKIQKENDNSFKVFKNDIVFFIYPDGSFRGGKIVSFLEEKSIVAFSNPKFPAKISSQPHSFLTLFNGKANSHKQFTIGKAVGIIKLNLDILGNIKSYQVIGNAKSEFLETIKGIVNG

SEQ ID NO: 1548 - protein, 135 aa, synthetic construct
  REGION 1..135: note = MG86-47 PI domain
KVHLEDEKLVYGRIDAANFDRIKKENDNSFKVYKNDVVFFVYADESFKGGKIVSFLEDKKMAAFSNSRFPASIGLQPHSFLTIFNGKANSHKQQSLNKAVGIIKLNLDITGTIKSFQSIGTINSELLEFIKEAKK

SEQ ID NO: 1549 - protein, 135 aa, synthetic construct
  REGION 1..135: note = MG86-48 PI domain
KAKLKDGKFKYERIDMSNIQRIKKKKDTGFKVYKNDVVFFTYPDGSCKGGRIVSFLDEKNLVAFSNPRFPGSIAYQPEEFLTFFNGKPNSHKQHSIKKAIGIIKLNLDITGNIKSYRTIGSCESEFLEFLKSIKS

SEQ ID NO: 1550 - protein, 137 aa, synthetic construct
  REGION 1..137: note = MG86-50 PI domain
RCSVETPTRLFTDRIDFKDSILLKKNDGSCIDIFNNDLVEICTYEKKQVVLKLTGLLRTFVIDAKENKMLKVKNPKYPIREEAQPKQYNSYVAVKKMCGIKKYKTDASGKVLGFYYLGRVLDNEKELFAKVLSYKAL

SEQ ID NO: 1551 - protein, 139 aa, synthetic construct
  REGION 1..139: note = MG86-51 PI domain
IFEKKDNNKLNITKVDINSLEKLESKNSLIVYLNEIIYIFNNKKIIHYGALRSFSISNQGAKLIKLFNPKFPSNPKAQPAYFSKGSSFKDISIGSATGVIKVKLDISGKIKSYQKYGFISKELEEQFLKESGYGCLENS

SEQ ID NO: 1552 - protein, 140 aa, synthetic construct
  REGION 1..140: note = MG86-52 PI domain
HLSKGPKGKLTIRRVDVNNAHQLSRQKEGMLCYLNEMLFFFNKDKLIHYGCLRSYIESSKKVALFNPRFPANPKTQPKRFTTGSQIKQVSVGSTTGVIKAHLDLDGHVKSYELFGQITPKQLRWFIEESGYGGVENDPDH

SEQ ID NO: 1553 - protein, 142 aa, synthetic construct
  REGION 1..142: note = MG86-53 PI domain
IFAKGEKEKLHIEKVDVNSHKKLQNKDAMIIYLNEMIYLFNKKKIIHYGCLRSFSVKSAGGKYVKLFNPRFPSNPKAQPKKFSTGTSTRDVSVGSVTGVIKVHLDLTGKIKSYEKFGLISKELEERFLEECGYGSMEDDTYH

SEQ ID NO: 1554 - protein, 143 aa, synthetic construct
  REGION 1..143: note = MG86-54 PI domain
HLSKGPKGKLTIRRVDVNNAHQLSRQKEGMLCYLNEMLFFFNNKKLIHYGCLRSFSINNQGAKYLALFNPRYPANPKAQPKRFTTGKKIKPVSVGSTTGVIKAHLDLDGHVKSYELFGQIIPEQLRWFIEESGYGGVENDPDH

SEQ ID NO: 1555 - protein, 149 aa, synthetic construct
  REGION 1..149: note = MG86-55 PI domain
YVTKEKNAIGIFVEKSGKGIDVRRVDVTNKNEFAEKSKKGEGRIFYMNEPLFFFDKKGQIVASGALGGTTTIDKMGIAGKVMLFNPKFPRSPKFQPSHFATGKGSLKEFGIKKAVGVLKITPDLTGRIIKHEKIGIVPSDAMKIVLEGV

SEQ ID NO: 1556 - protein, 143 aa, synthetic construct
  REGION 1..143: note = MG86-63, MG86-56 PI domain
HLSKGPKGKLTIQRVDVNNAHKLKRQREGLFCYLNEMLFFFNEKKLIHSGCLRSFSINNQGSKYVKLFNPKFPSNPKAQPKKFSTGSSTRDVSVGSTTGVIKVHLDMDGHVKSYELFGTVTSEQLRWFIEESGYGGVENDTNH

SEQ ID NO: 1557 - protein, 144 aa, synthetic construct
  REGION 1..144: note = MG86-57 PI domain
FIEKGAKKLQIYRMDVNNFREFSDKKGMVCFLNEMLFFFNSKKLIHYGCLRSFSINNQGAKLVKLFNPKFPSNPKAQPDKFSNGSSIRDVSIGSATGVIKAHLDFDGHVKSYEVFGSVSAEQLAWFRKESGYGSVEDGAHHEAL

SEQ ID NO: 1558 - protein, 142 aa, synthetic construct
  REGION 1..142: note = MG86-58 PI domain
MFERGKKDRLEISKIDLNSMHRLRHSDAMIVYLNEIIYLFNKKKIMHYGALRSFSINKQGGKYIKLFNPRFPGSPKSQPGFFSTGSSIKAVSIGSATGVIKVHLDLDGRVKSYEKYGSIPKELERDFLEESGYGVMEDNTHH

SEQ ID NO: 1559 - protein, 142 aa, synthetic construct
  REGION 1..142: note = MG86-59 PI domain
FVEKGSKKLSFTRVDVNNVKELDRRFDGLKVYLNEMIYIFNDKKLIHYGCLRSFSENNQGTKYVKLFNPRFPSKPKSQPEKFAQPSGIKDVSIGSATGIIKVHLNLNGTVKSYEKFGTIPQKFEKEFLEESGYGGVEDNTHH

SEQ ID NO: 1560 - protein, 130 aa, synthetic construct
  REGION 1..130: note = MG86-60 PI domain
KAKFENEELIYQRIDLANMKNNLKIKGLFIGRNNLIYIVFKKEEKNLIGSLESFDEKNNTIRLFDPRFPKTLEYQPQKYKVTSGKSRKEFSIGSAMGIIKINLDILGNIKSYEKLGVITKELEQKLFHKE

SEQ ID NO: 1561 - protein, 143 aa, synthetic construct
  REGION 1..143: note = MG86-61 PI domain
HLSKGAKGKLTIRRMDVNNVHELSRQKDGMLCYLNEMLFFFKPDKLIHHGCLRSFLENSQGAKLVALFNPKFPATPKSQPKFFAPGSQIKQVSVSSTTGVIKAHLYLDGHVKSYELFGTVTPEQLRWFIEESGYGGMENDTNH

SEQ ID NO: 1562 - protein, 136 aa, synthetic construct
  REGION 1..136: note = MG86-62 PI domain
RCGYIEGESKLSLKRIDIRAYVKNKTAAPNEMDIFNNDLVEVYLLKKRELFKRIVGIVKGFTESKGGRINIRNPKYPLLKEKQPKLYQSEISIGSSCGIKKYKTDASGKVLGFYYLGRVQHEDEELFSKVLAYRRI

SEQ ID NO: 1563 - protein, 142 aa, synthetic construct
  REGION 1..142: note = MG86-64 PI domain
FVTKGSKKLEIVRMDVNNINDLQKEKEGIRVYLNEMIYLFNEKKVLHYGCLRSYLENAQGAKMIALFNSRFPANPKSQPKMFSTGSQIKQVSIGSTTGIVKVHLDINGSVKSYEKFGFIPKELEEEFKLECGYGGVEDDTHY

SEQ ID NO: 1564 - protein, 141 aa, synthetic construct
  REGION 1..141: note = MG86-65 PI domain
HLLIRSGKLQISRLDVNNAYQIKQSEGMRVYLNEMIYLYNDKKLLHYGCLRSYLENAQGAKMIALFNSRYPANPKSQPERFSTGSQIKQVSVGSATGVVKVHLDIDGRIKSYEKYGMIPKEFEEAFRQECGYGGVEDDTDH

SEQ ID NO: 1565 - protein, 140 aa, synthetic construct
  REGION 1..140: note = MG86-66 PI domain
VIRRRENGKLSIVKIDVNNAGKMLTVSEGMIVYLNEMLYLFGERGLLHYGCLRSYVDNRRNIALFNPRFPANPKAQPKKFSTGSQIKQVGVGSAVGVIKPRIDLDGSVKSFQVFGEVTTEQVTWFKKETGYGGVENDTHL

SEQ ID NO: 1566 - protein, 142 aa, synthetic construct
  REGION 1..142: note = MG86-67 PI domain
MFEKGEKEKLIISKIDMNSLHQLKKQNAMIVYPNEVIYLFNKKKIIHYGALRSFLIKSSGARQIALFNPRFPSNPKSQPRNFSDGKSIKSVSIGSTTGIIKVQLDMNGKMKSYQKFGLIPKELEEAFLKESGYGGMEDNTDN

SEQ ID NO: 1567 - protein, 144 aa, synthetic construct
  REGION 1..144: note = MG86-68 PI domain
FIQKGEKKLMISRMDVNNAHELEQNKNGLRVYLNEIIYLYNDKKLLHYGCLRSFVEGNGKIALFNPRFPANPSSQPKFFSTKNEKTTGQIKQIGVGSATGIIKVQLDLNGQMKSYQKFGTIPKELEMQFLKESGYGSMEDDTHH

SEQ ID NO: 1568 - protein, 139 aa, synthetic construct
  REGION 1..139: note = MG86-69 PI domain
FIEKGEKKLKISRMDVNNAYELEQNKNGMRVYLNEMVYFYNEKKSLHYGCLRSYVEGRSNIALFNPRFPANPKVQPSIFSTGSQIKQVSIGSATGIIKAQLNFNGQIKSYQKFGYIPKEFEEVFKKECGYGSMEDDTDH

SEQ ID NO: 1569 - protein, 142 aa, synthetic construct
  REGION 1..142: note = MG86-70 PI domain
MFEKGEKEKLHISKVDVNSLHRLKQENAMIVYLNEVIYLFNKKKIIHYGALRSFSINNQGGKYLKLFNPRYPSNPKAQPKMFTTGSSIKDVSIGSTTGVIKVQLDINGKMKSYQKFGLIPKDLEEEFLKESGYGIVEDNTDH

SEQ ID NO: 1570 - protein, 137 aa, synthetic construct
  REGION 1..137: note = MG86-71 PI domain
RCSVETQTRLFTDRIDFKDSILLKKNDGSYIDIFNNDLVKIFTYEKKQVVLKLTGLLRTFVINAKEDKMLKVKNPKYPIREEAQPKQYNSYVAVKKMCGIKKYKTDASGKILGFYYLGTILDDEKELFAKVLSYKAL

SEQ ID NO: 1571 - protein, 134 aa, synthetic construct
  REGION 1..134: note = MG86-72 PI domain
RCSFDEPKLQLQRIDIRSHVQNRNKNDTQIDIFNNDLIEIYVIKSKKIEYKAIGVLKGFTESKGGRANLRNPKYPLLKDKQPKLFQGEFSIGSTCGIKKYKTDASGRVLGFYYLGRVLEGDKELFSKVVTYRKM

SEQ ID NO: 1572 - protein, 143 aa, synthetic construct
  REGION 1..143: note = MG86-73 PI domain
FISKAENNRVKIERMDVNNAPKLLKRNSGLKVYLNEMIYLFNEKKVIHYGCLRSYVEKTGNSKLVALFNPRFPASPKSQPKMFSTGSQIKQVSVGSATGVIKVHLDLSGQIKSYEKFGMISKELENEFLQECGYGSMEKHPDH

SEQ ID NO: 1573 - protein, 136 aa, synthetic construct
  REGION 1..136: note = MG86-74 PI domain
RCEYADTTKLVLKRIDIRAFASSDQIKAHQIDIYNNDLIEIFIIKSKSIESKVIGILKGFTESKGGRANIRNPKFPALKEKQPKIYQNEISIGSICGIKKYKTDATGKVLGFYYLGRVKEESAELFSPVVAYRKLL

SEQ ID NO: 1574 - protein, 133 aa, synthetic construct
  REGION 1..133: note = MG86-75 PI domain
EVDITDVNLVYKRIDASNIHKVKKENHNSFKVYKNDLVFFIYPDRSFKGGKIVSFLEDKKVGAFSNPRFPANIGFQPHSFLTIFNGKANSHKQVSLNKAIGIIKLNLDILGNIKSYSKIGIIESEFLDFLKNK

SEQ ID NO: 1575 - protein, 140 aa, synthetic construct
  REGION 1..140: note = MG86-76 PI domain
KASLEDEKLHYTRIDVSNFDKIRKENDNSFQVFKNDLVFFIYPDGSFRGGKIVSFLEDKKIASFSNPKFPSASEFQPISFCKIGKDSNNNPKKSGAKQQGINASIGIIKLNLDITGNIKSYQKIGRCESELLEFTKDIKV

SEQ ID NO: 1576 - protein, 137 aa, synthetic construct
  REGION 1..137: note = MG86-77 PI domain
RCKAETENRLFTERIDFKDKILLKKNDGTFIDIYNNDLVDIYTFEKKQVILKLTGLLRTFVINAKEDKMLKVKNPKFPIREDAQPKQYNSYVAVKKMCGIKKYKTDATGKVLGFYYLGRVLDDEKELFTKVLSYKAL

SEQ ID NO: 1577 - protein, 134 aa, synthetic construct
  REGION 1..134: note = MG86-78 PI domain
RAIFENGKLSYKRIDVINFKQMNNKNDGSFKVYKNDSVFFVYLDKTMKGGKIVSFLENKKIAAFSNPKFPSAYKFQPNSFCKDKSHTGAKQHSVGSAIGIIKLNLDILGNIKSYQVLGNAKSEFLETIKGIVNG

SEQ ID NO: 1578 - protein, 134 aa, synthetic construct
  REGION 1..134: note = MG86-79 PI domain
RATFENGELSYRRIDVINFKQMNNKNDGSFKVYKNDLVFFVYLDKTIKGGKIVSFLENKKIAAFSNSKFPSAYKFQPNSFCKDKSHTGAKQHSVGSAIGIIKLNLDILGNIKSYQVIGNAKSEFLETIKGIVNG

SEQ ID NO: 1579 - protein, 124 aa, synthetic construct
  REGION 1..124: note = MG87-28, MG87-38, MG87-40, MG87-1 PI domain
AQAGIEVYYNETKNCFAFVPIPSVCYNLKTRKVNRKHKLYKRYKELNLKDYKVKYIVTLYNGNTIEVLKKDNTIIKGVVSSYHKTNDKIVLKNGSYFTKSDLEFSIIDYNPIGKSQKRLTKRIK

SEQ ID NO: 1580 - protein, 130 aa, synthetic construct
  REGION 1..130: note = MG87-20, MG87-59, MG87-2 PI domain
KQVSTRIFYSYEDKKFIFLPICAISFVNGKLNKKEKNYQTTYNRLIGNKNVKEMGNIYVGEWVGVYKKNGEYFEGRYKGYHKTSNVLEYYINGLDTLSCATIGSSDLRIIIYTTDILGNRHIRLDTQKEI

SEQ ID NO: 1581 - protein, 118 aa, synthetic construct
  REGION 1..118: note = MG87-3 PI domain
KQFCVKVYVDNDNKKFVFLPIYTISLDPKTKKVNENDEFYKLFYNKYIGNKNVTFFADIYNGNKLEITKKDGTIVSGYYSTFNKANNKLILNNGDTFTLSDKKISIIHTDILGNEKKG

SEQ ID NO: 1582 - protein, 123 aa, synthetic construct
  REGION 1..123: note = MG87-5 PI domain
KQFCVKVYVDNDNKKFVFLPIYTISLDPKTKKVNENNEFYKLFYNKYIGNKNVTFFADIYNGNKLEITKKDGTIVSGYYSTFDKSANRLETQNGYIFVCSDKKISIVHTDILGNEKKRLTKEL

SEQ ID NO: 1583 - protein, 124 aa, synthetic construct
  REGION 1..124: note = MG87-9 PI domain
AQAGIEVYYNIDKNNLVFVPIPSIAVNLKNRAINYQHPVLVKYCKKYLNDCNAKRIVTLFNGNTIEVYKSKGNIVKGEVSSFDKNSNRIRLRDGSSFVTSDRGFSVIDYNPIGKSQKRLTFMIK

SEQ ID NO: 1584 - protein, 124 aa, synthetic construct
  REGION 1..124: note = MG87-48, MG87-10 PI domain
AQAGIEIYYNIDKNCFAFVPIPCICYDFKTGKVNKEHPEYIKYFKKNIGNQNIEYKATLYNGNFIEINKKDGKTIKGEVSCYHKTYDRIDLKNGGLFTKSDQGFSIIDYSPTGKAQKRLTFMIK

SEQ ID NO: 1585 - protein, 123 aa, synthetic construct
  REGION 1..123: note = MG87-19, MG87-11 PI domain
KQFCVKVYVDNDNKKFVFLPIYTISLDPKTKKVNENDEFYKLFYNKYIGNKNVTFFADIYNGNKLEITKKDGTIVSGYYSTFHKTHNYLVLNNDKGVMQSDKKISIIHTDILGNEKKRLTKEL

SEQ ID NO: 1586 - protein, 130 aa, synthetic construct
  REGION 1..130: note = MG87-12 PI domain
KQVSTRIFYSYEDKKFIFLPICAISFVNGKLNKKEKNYQTTYNRLIGNKNVKEMGNIYLGEWVGVHKKNGEYFEGRYKGYDKTNNVLEYYINGLDTLSCATIGSSDLRIIIYTTDILGNRHIRLDTQKEI

SEQ ID NO: 1587 - protein, 123 aa, synthetic construct
  REGION 1..123: note = MG87-13 PI domain
KQFCVKVYVDNDNKKFVFLPIYTISLDPKTKKVNENGEFYKLFYNKYIGNKNVTFFADIYNGNKLEITKKDRTIVSGYYSTFNKANNKLILNNGDTFTLSDKKISIIHTDILGNEKKRLTKEL

SEQ ID NO: 1588 - protein, 124 aa, synthetic construct
  REGION 1..124: note = MG87-53, MG87-14 PI domain
AQAGIEVYYNETKNCFAFVPIPSVCYNLKTRKVNREHKLYKRYKELNLKDYKVKYIVTLYNGNTIEVLKKDNTIIKGVVSNYHKTHDNIVLKNGSYFTKSDLEFSIIDYNPIGKSQKRLTKRIK

SEQ ID NO: 1589 - protein, 124 aa, synthetic construct
  REGION 1..124: note = MG87-15 PI domain
AQAGIEVYYVTDKKCFAFVPILCVCFNFKTCKVNKEHPEYIKYFKKNIGNQNIEYKATLYNGNFIEINKKDGKTIKGEVSCYHKTYDRIDLKNGGLFTKSDQGFSIIDYSPTGKAQKRLTFMIK

SEQ ID NO: 1590 - protein, 123 aa, synthetic construct
  REGION 1..123: note = MG87-8, MG87-16 PI domain
KQFCVKVYVDNDNKKFVFLPVYTISLDPKTKKVNENDEFYKLFYNKYIGNKNVTFFADIYNGNKLEITKKDGTIVSGYYSTFDKSSNRLETQNGHKFVCSDKKISIIHTDILGNEKKRLTKEL

SEQ ID NO: 1591 - protein, 130 aa, synthetic construct
  REGION 1..130: note = MG87-18 PI domain
KQVSTSIFYAYEDKKFIFLPICAISFINGKLNEKENNYQTTYNRLIGNKKVTKIGNIYTGEWVGVYKKNGQYLEGRYKGYHKNNNCLEYYINGLDTLSCSTISSSDSRIIIYTTDILGNRYIRLDTDKII

SEQ ID NO: 1592 - protein, 124 aa, synthetic construct
  REGION 1..124: note = MG87-44, MG87-21 PI domain
SQAGIEIYYNIDKNCLAFIPIPAIAVNLKTRVINHNHPMLERYRKKYLKDSNAKRIVTLFNGNTIEIYKAKGGVIKGEVSSFDKDANRIRLKDRSSFVTSDRGFSIIDYNPIGKAQKRLTFMIK

SEQ ID NO: 1593 - protein, 130 aa, synthetic construct
  REGION 1..130: note = MG87-7, MG87-22 PI domain
KQVSTSIFYAYEDKKFIFLPICAISFINGKLNEKENNYQTTYNRLIGNKKVTKIGNIYTGEWVGVYKKNGQYLEGRYKGYHKKNNCLEYYINGLDTLSCSTISSSDSRIIIYTTDILGNRYIRLDTDKII

SEQ ID NO: 1594 - protein, 124 aa, synthetic construct
  REGION 1..124: note = MG87-30, MG87-37, MG87-49, MG87-23 PI domain
AQAGIEVYYNIDKNCFVFVPIPCTCYNFKTGKVNKKNNEYIKYYQKNIGTYNVQYKTTLYNGNTIEINKKDGSIIKGEVSYYHKTLDKIVLKSEQAFTKSDLGFSIIDYSPIGKCQKRLTFMIK

SEQ ID NO: 1595 - protein, 130 aa, synthetic construct
  REGION 1..130: note = MG87-26 PI domain
KQVLTRIFYSYEDKKFIFLPICAISFVNGKLNKKEKNYQTTYNRLIGNKNVKEMGNIYVGEWVGVYKKNGEYFEGRYKGYHKTSNVLEYYINGLDTLSCATIGSSDLRIIIYTTDILGNRHIRLDTQKEI

SEQ ID NO: 1596 - protein, 130 aa, synthetic construct
  REGION 1..130: note = MG87-33, MG87-66, MG87-68, MG87-29 PI domain
KQVSTRIFYSYDDKKFIFLPICAISFVNGKLNKKEKNYQTTYNRLIGNKNVKEIGNIYTGEWVGVYKKNGEYLEGRYKGYHKTSNVLEYYINGLDTLSCVKICSSDLRIIIYTTDILGNRHIRLDTQKEI

SEQ ID NO: 1597 - protein, 124 aa, synthetic construct
  REGION 1..124: note = MG87-31 PI domain
AQAGIEVYYNIDKNCFVFVPIPCTCYNFKTGKVNKENNEYIKYYQKNIGTYNVQYKTTLYNGNTIEINKKDGSIIKGEVSYYHKTLDKIVLKSEQAFTKSDLGFSIIDYSPIGKCQKRLTFMIK

SEQ ID NO: 1598 - protein, 123 aa, synthetic construct
  REGION 1..123: note = MG87-32 PI domain
KQHCVKVYVDNDKKNFVFLPIYIISLDPKTKKINENDEFYKLFYNKYIGNKNVTFFADIYNGNKLEITKKDGTVVNGYYSTFDKTNNKLILNNSSTFTQSDKKVSIIHTDILGNEKKRLTKEL

SEQ ID NO: 1599 - protein, 130 aa, synthetic construct
  REGION 1..130: note = MG87-52, MG87-34 PI domain
KQVSTRIFYSYEDKKFIFLPICAISFVNGKLNKKEKNYQTTYNRLIGNKNVKEMGNIYVGEWVGVYKKNGEYFEGRYKGYHKTNNVLKYYINGLDTLSCATIGSSDLRIIIYTTDILGNRHIRLDTQKEI

SEQ ID NO: 1600 - protein, 124 aa, synthetic construct
  REGION 1..124: note = MG87-39 PI domain
GQYCTKIYWDRNNNEFIFMPIYLTSIDLSTKKINKNSSTYKYYYNTYLKGKNYQFITDVYNGDLIEVEKKDTIIKNYVSCYHKGAHNCIELKNKGSFNVSDKAFKIIDTDYLGNEKIRLTWPKK

SEQ ID NO: 1601 - protein, 124 aa, synthetic construct
  REGION 1..124: note = MG87-6, MG87-41 PI domain
AQAGIEVYYNIDKNTLVFVPIPSIAVNLKNRAINYQHPVLVKYCKKYLNDCNAKRIVTLFNGNTIEVYKSKGNIVKGEVSSFDKNSNRIRLRDGSSFVTSDRGFSVIDYSPIGKSQKRLTFMIK

SEQ ID NO: 1602 - protein, 123 aa, synthetic construct
  REGION 1..123: note = MG87-43 PI domain
KQFCVKVYVDNDNKKFVFLPIYTISLDPKTKKVNENDEFYKLFYNKYIGNKNVTFFADIYNGNKLEITKKDGTIVSGYYSTFNKSANRLETQNGYIFVCSDKKISIIHTDILGNEKKRLTKEL

SEQ ID NO: 1603 - protein, 124 aa, synthetic construct
  REGION 1..124: note = MG87-45 PI domain
AQAGIEVYYNETKNCFAFVPIPSVCYNLKTRKVNREHKLYKRYKELNLKDYKVKYIVTLYNGNTIEVLKKDNTIIKGVVSSYHKTNDKIVLKNGSYFTKSDLEFSIIDYNPIGKSQKRLTKRIK

SEQ ID NO: 1604 - protein, 124 aa, synthetic construct
  REGION 1..124: note = MG87-46 PI domain
AQAGIEVYYNIDKNCFVFVPIPCTCYNFKTGKVNKKNNEYIKYYPKNIGTYNVQYKTTLYNGNTIEINKKDGSIIKGEVSYYHKTLDKIVLKSEQAFTKSDLGFSIIDYSPIGKCQKRLTFMIK

SEQ ID NO: 1605 - protein, 123 aa, synthetic construct
  REGION 1..123: note = MG87-47 PI domain
KQFCVKVYVDNDNKKFVFLPIYTISLDPKTKKVNENDEFYKLFYNKYIGNKNVTFFADIYNGNKLEITKKDGTIVSGYYSTFHKTYNYLVLNNDKGVMQSDKKISIIHTDILGNEKKRLTKEL

SEQ ID NO: 1606 - protein, 123 aa, synthetic construct
  REGION 1..123: note = MG87-51 PI domain
KQFCVKVYVDNDNKKFVFLPVYTISLDPKTKKVNENDEFYKLFYNKYIGNKNVTFFADIYNGNKLEITKKDGTIVSGYYSTFHKTHNYLVLNNDKGVMQSDKKISIIHTDILGNEKKRLTKEL

SEQ ID NO: 1607 - protein, 123 aa, synthetic construct
  REGION 1..123: note = MG87-55 PI domain
KQYCVKIYVDEKDKKFVFLPIYTISLNPKTKLINENDNYYKLFYDKYIKDKNVSFFADIYNGNKLEITKKDGTVITDYYSCFHKTHNMLVLNDGGSFTTNDKKISIIHTDILGNEKKRLTKEL

SEQ ID NO: 1608 - protein, 123 aa, synthetic construct
  REGION 1..123: note = MG87-56 PI domain
KQFCVKVYVDNDNKKFVFLPIYTISLDPKTKKVNENDEFYKLFYNKYIGNKNVTFFSDIYNGNKLEITKKDGTIVSGYYSTFDKSSNRLETQNGHKFVCSDKKISIVHTDILGNEKKRLTKEL

SEQ ID NO: 1609 - protein, 130 aa, synthetic construct
  REGION 1..130: note = MG87-60 PI domain
KQVSTRIFYSYDDKKFIFLPICAISFVNGKLNKKEKNYQTTYNRLIGNKNVKEIGNIYTGEWVGVYKKNGEYFEGRYKGYHKTSNVLEYYINGLDTLSCAKICSSDLRIIIYTTDILGNRHIRLDTQKEI

SEQ ID NO: 1610 - protein, 123 aa, synthetic construct
  REGION 1..123: note = MG87-61 PI domain
SIYCTRLYWDKDKKKILFMPIYAPVVNPVTGKINEQHPLYKLYYEQCIEGKNVQFIVDLFNGNYVEIEKSDGTTIKEYIKGYAKASSSIQCKSGKYLSPKDKFTLYDVDVLGNKIKRLTWPQD

SEQ ID NO: 1611 - protein, 135 aa, synthetic construct
  REGION 1..135: note = MG87-63, MG87-62 PI domain
AIYCTKLYWDKDEKKILFFPIYLPVLKFDKKKGNDQHPKINDQHPLYQLYYNKLLKGKRVEHIVDLYNGNFIKIEKNKKAPTFEYVSTFDKNSGNVRCKLLNGKNGSRISSKDKFTLYDVDILGNKKKRLTWPKE

SEQ ID NO: 1612 - protein, 124 aa, synthetic construct
  REGION 1..124: note = MG87-64 PI domain
KQYCTEIYYDIDHNKFAFLPVYSVSVDLNHKKINREDSYYKKMREVYLKDSTVEYITTIFNGNYISVIKKNGFIINGFYRYFHRTNNKLLLKNDEALTSSDKSFTIYDVDVLGNKKERLTYSIK

SEQ ID NO: 1613 - protein, 130 aa, synthetic construct
  REGION 1..130: note = MG87-67 PI domain
SQVSTQILYGIEDKKFIFLPIPSICYQNGRLNTNHPYYIETYNRLVGSQKAIEFASIYCGEWVGVIKRNGEYKEGRYSTYNKNNNNLILDTNGLKSVSETYITANDQAIIIYTTDILGNRYVRLDSRKIL

SEQ ID NO: 1614 - protein, 123 aa, synthetic construct
  REGION 1..123: note = MG87-69 PI domain
AQTCTQVFYNKSKNCFAFLPIYSISVDLNTRKIIKNDYYKQMYNEYIKEDEVKHIVDLYNGNYIEVTKKDGTIIKGEYKCFHKTNAVVTLKNDLYFTKQDKKLVVKDKDVIGNEKERLTFEIK

SEQ ID NO: 1615 - protein, 133 aa, synthetic construct
  REGION 1..133: note = MG87-70 PI domain
SQYCTEIYYNYETQKFIFLPIFMVSVDVNSKKINRDEHYFKETYERLIGNKKPKYIATLYNGSWCEITKKNNQTAEGRYIGYHKTNNLLTFGKDGEYSSSAPLYMSPNDKRIIIYGFNILGKKYKILDSNDII

SEQ ID NO: 1616 - protein, 147 aa, synthetic construct
  REGION 1..147: note = MG88-4, MG88-1 PI domain
EIFEIRDDDTRYPKLRGRWQVEILSNYNAQLNAGAPLWRHKYATAKRIMSLRINDMVMAEFSKDDPKLPKGLVETVAHQCAIEKTDKVNVVFRVKKLNSSGTVYLRPHFIAKEDADTKSWIASATSLQEHKARKVCVSPSGKILGLK

SEQ ID NO: 1617 - protein, 200 aa, synthetic construct
  REGION 1..200: note = MG88-3 PI domain
DVYQISPRDKVYTDKKEQGSWKVEVLSNYMATLNKGQALWRKKHPTARLVMRLKIDDMVMGENFTKEEAEQKLQQEIEKWEKSKEMKKYKDKLTEWEKTHEGKEPKKPEKPKSINEIIIEKCNKEKTSSTSFLFRVKKISSDGSVYIRPDFITKEESDKKSVKLSASSYQKYKIRKVFVSPAGKLVDNGFSDKWNDTKCN

SEQ ID NO: 1618 - protein, 157 aa, synthetic construct
  REGION 1..157: note = MG88-5 PI domain
EVYQINPQNKIEGVSTNNQGEWRTEIVSNYNATIRQKRGEDIGYWRYKYPNAKRIMSLRRNDMVLATFSKEQAFSDDFPKGISSYVREKFEHNPSLEYIDILFRVKKMSESSIFFTPHDIAKEDADPKSWKASAEKMKLYNTRKVFVTPMGRICHAK

SEQ ID NO: 1619 - protein, 157 aa, synthetic construct
  REGION 1..157: note = MG88-6 PI domain
DIYCLRPDDKKYPKDAGKWKGEVISNFSVHQPDFQPQWRKIHPTAKRVMRLFINDTVCLTFNRNEPEDEIPMGLKSFVSDAFAKNTGKEINMLFRVKKMSGSRVYLRPSFVSKEEGDKLSWGPSAQGLFERKARKVYVNEIGEYKDPGFVDVWEKKK

SEQ ID NO: 1620 - protein, 163 aa, synthetic construct
  REGION 1..163: note = MG88-7 PI domain
DIICLRPDDKREPEKAGKWKGEVISNYNAHKPNFEPKWRKEHPTAKRIMRLFINDMIVLTFNKKDKNDFPKNIKNFILEEFNKTKKNEVDMVFRIKKISTNGTFFITPHFIVKDEKDKFSWGASVSGIFIYKARKVYVDELGKIIDNGFIQGWEKNVKCVRNK

SEQ ID NO: 1621 - protein, 147 aa, synthetic construct
  REGION 1..147: note = MG88-8 PI domain
DVFKMRDDDKRYPKLRGRWQVEILSNYNAQLDAGSPLWRRKYATAGRVMRLRINDMVMATFSKDDPKLPKGLVETVMHQCAIENTDTVNVIFRVKKISSNGTIYLRPHFIAKEEGDTKSWIASATSLQEHNAHKVYVSPSGKLQCLE

SEQ ID NO: 1622 - protein, 147 aa, synthetic construct
  REGION 1..147: note = MG88-9 PI domain
DVFKMRDDDKRYPKLRGRWQVEILSNYNAQLDAGSPLWRRKYATAGRVMRLRINDMVMATFSKADPKLPKGLVETVMHQCAIENTDTVNVIFRVKKISSNGTIYLRPHFIAKEEGDTKSWAASATSLQEHNAHKVYVSPSGKLQCSE

SEQ ID NO: 1623 - protein, 147 aa, synthetic construct
  REGION 1..147: note = MG88-10 PI domain
DVFKMRDDDKRYPKLRGRWQVEILSNYNAQLDAGSPLWRRKYATAGRVMRLRINDMVMATFSKDDPKLPKGLVETVMHQCAIENTDTVNVIFRVKKISSNGTIYLRPHFIAKEEGDTKSWAASAASLQEHNARKVYVSPSGKLQYSE

SEQ ID NO: 1624 - protein, 145 aa, synthetic construct
  REGION 1..145: note = MG88-11 PI domain
DIFEIRSDDKHYPKDAGKWKVDIVSNYMAETNPGVSLWHKKYPTARRIMSLRINDMVMAEFSKDDPQLPNGIRDTVAHQCAVENKDTVNMVFRVKKLNSSGTIYLRPHFIAKEDADTKSWIASTTSLKEHKARKISVSPTGKILK

SEQ ID NO: 1625 - protein, 157 aa, synthetic construct
  REGION 1..157: note = MG88-12 PI domain
EIYQIHPENRICGIPTNNRGEWKMEVVSNYNATVRQSRGENIGYWYYKYPNAKKIMRLRRNDMVMATFTKEQAFADKFPKGICEYVRGKFEQNQLLAQVDILFRVKKMVSGVITFTPHDIAKEQADTKSWSASSGAMQTYRTRKVKVTPMGRICHVK

SEQ ID NO: 1626 - protein, 156 aa, synthetic construct
  REGION 1..156: note = MG88-2, MG88-13 PI domain
EIYEINPNNKIEGVASKDRGEWKTEIVSNYNATVRNSRGEDIAYWRYKYPNAKRIMSLRGNDMVMATFSREQAFDEKFPKGIQEYVREKFQQKSDCQELDILFRVKKMGSNGICFTPHNIAKENADTKSWIASAGAMQKYRVRKIHISYMGRIQNA

SEQ ID NO: 1627 - protein, 147 aa, synthetic construct
  REGION 1..147: note = MG88-14 PI domain
DVFKMRDDDKRYPKLRGRWQVEILSNYNAQLDAGSPLWRRKYATAGRVMRLRINDMVMATFSKDDPKLPKGLVETVMHQCAIENTDTVNVIFRVKKISSNGTIYLRPHFIAKEEGDTKSWAASATSLQEHNAHKVYVSPSGKLQCSE

SEQ ID NO: 1628 - protein, 157 aa, synthetic construct
  REGION 1..157: note = MG88-15 PI domain
EIYEINPQNKICGVTTKDCGEWKSEIVSNYNATIRNNRGEDIAYWRYKYPNAKRIMSLRGNDMVMATFSREQAFDENFPKGIQEYVREKFQQKPDCKELDILFRVKKLTNNGQIFITPHNIAKENADTKSWGASASAMQKYKMRKVHISYMGRIQNA

SEQ ID NO: 1629 - protein, 112 aa, synthetic construct
  REGION 1..112: note = MG89-1 PI domain
DIFKKKGQYYFVPIYSWNKSLPNRACQGKNKSDWVVVDDSYEWCFSVRTNDLLKIVIKGKTYFDYYITLDVHSDGRIRLLNHDRQEDDVHYEKGEFRILIKNADSINIMLMF

SEQ ID NO: 1630 - protein, 128 aa, synthetic construct
  REGION 1..128: note = MG89-3 PI domain
DIFFKEGKYYLVPIYAIAKELPNRACVAKKHESEWTVIDDTYQWCFSVTQYDLIKIELKKETYFGYFNGFDRATGAVNIILHDRSTEKYKKGLIRSIGLKTAKSVTKYRVDVLGNYYLAGAEKRLELA

SEQ ID NO: 1631 - protein, 129 aa, synthetic construct
  REGION 1..129: note = MG89-4 PI domain
DIFKKKSQYYFVPIYSWNKSLPNRACQGKNKSDWVVVDDSYEWCFSVRTNDLLKIVIKGKTYFDYYITLDVHSDGRIRLLNHDRQEDDVHYEKGEFRILIKNADSINKYNVDVLGNYYLAKPEKRLELA

SEQ ID NO: 1632 - protein, 129 aa, synthetic construct
  REGION 1..129: note = MG89-19, MG89-24, MG89-30, MG89-35, MG89-10 PI domain
DIFKKKGQYYFVPIYSWNKSLPNRACQGKNKSDWVVVDDSYEWCFSVRTNDLLKIVIKGKTYFDYYITLDVHSDGRIRLLNHDRQEDDVHYENGEFRILIKNADSINKYNVDVLGNYYLAKPEKRLELA

SEQ ID NO: 1633 - protein, 128 aa, synthetic construct
  REGION 1..128: note = MG89-2, MG89-22, MG89-27, MG89-28, MG89-32, MG89-46, MG89-65, MG89-11 PI domain
DLFKKDGKYYCIPVYAWNKTLPNRAYVSGKKETDWALVDDSFEWCFSIRQNELLKIKLKGETIFGYYNGFDRDRGSFNILLHDRQDGKDHKQGLIRKGIKTAISITKYDVDVLGNYYLSKPEKRLELA

SEQ ID NO: 1634 - protein, 129 aa, synthetic construct
  REGION 1..129: note = MG89-13, MG89-14, MG89-15, MG89-17, MG89-20, MG89-23, MG89-26, MG89-29, MG89-31, MG89-33, MG89-38, MG89-42, MG89-47, MG89-49, MG89-53, MG89-64, MG89-7, MG89-8, MG89-9, MG89-12 PI domain
DIFKKKGQYYFVPIYSWNKSLPNRACQGKNKSDWVVVDDSYEWCFSVRTNDLLKIVIKGKTYFDYYITLDVHSDGRIRLLNHDRQEDDVHYEKGEFRILIKNADSINKYNVDVLGNYYLAKPEKRLELA

SEQ ID NO: 1635 - protein, 129 aa, synthetic construct
  REGION 1..129: note = MG89-16 PI domain
DIFKKKGQYYFVPIYSWNKSLPNRACQGKNKSDWVVVDDSYEWCFSVRTNDLLKIVIKGKTYFDYFITLDVHSDGRIRLLNHDRQEDDVHYENGEYRISLKNADSINKYNVDVLGNYYLAKPEKRLELA

SEQ ID NO: 1636 - protein, 129 aa, synthetic construct
  REGION 1..129: note = MG89-21, MG89-25, MG89-40, MG89-50, MG89-52, MG89-55, MG89-18 PI domain
DIFKKRGKYYCIPIYAWNKTLPNKACVARKNESDWVEIDDSYEWCFSVRTNDLIRIDGKKESFFGYFNGFHRSVASFSILFHDRQISKKYKKGEKEGIGVKTAYSLTKYNVDVLGYYYLAKPEKRLELA

SEQ ID NO: 1637 - protein, 8 aa, synthetic construct
  REGION 1..8: note = MG89-34 PI domain
PFIVKLQK

SEQ ID NO: 1638 - protein, 129 aa, synthetic construct
  REGION 1..129: note = MG89-41 PI domain
DIFKKKGQYYFVPIYSWNKSLPNRACQGKNKSDWVVVDDSYEWCFSVRTNDLLKIVIKGKTYFDYYITLDVHSDGRIRLLNHDRQEDDVHYEKGEFRILIKNADSINKYNVDVLGNYYLAKPEKRLGLA

SEQ ID NO: 1639 - protein, 128 aa, synthetic construct
  REGION 1..128: note = MG89-54 PI domain
DLFKKDGKYYCIPVYAWNKTLPNRAYVSGKKETDWALVDDSFEWCFSIRQNELLKIKLKGETIFGYYNGFDRDRGSFNILLHDRQDGKDHKQGLIRKRIKTAISITKYDVDVLGNYYLSKPEKRLELA

SEQ ID NO: 1640 - protein, 124 aa, synthetic construct
  REGION 1..124: note = MG89-59 PI domain
DFFKKNEKYYAIPVYSWQQELPNKIAVKGKRECDWLTLDASYKFCFSVYKNDFLEISTKGKIIRGYYAEFDRHRCSILIKSHDRNELLEQRVAYMQVDYIKKLNVDLLGNVYDSFKEENTRERI

SEQ ID NO: 1641 - protein, 129 aa, synthetic construct
  REGION 1..129: note = MG89-60 PI domain
DIFKKSNKYYCVPIYSINKELPNLACVANKNESNWDVIDSSFEWCFSIRQNELIRIEQKNNFYFGYFNSFDRGNGTFSILLHDREDSKDHKKGEIRGIGVKTALSLTKYYVDVLGNYYKAQPEKRLELA

SEQ ID NO: 1642 - skipped

SEQ ID NO: 1643 - RNA, 114 nt, synthetic construct
  misc_feature 1..114: note = MG71-1 sgRNA
  source 1..114: mol_type = other RNA
gtttgagagtgatgtagaaatacatcacgagttcaaaaaacatgatttattcaaatcgtcttcttcagaagaccccacagtgtgtggaactaaagcttgcttcggcaggctttt

SEQ ID NO: 1644 - RNA, 107 nt, synthetic construct
  misc_feature 1..107: note = MG71-2 sgRNA
  source 1..107: mol_type = other RNA
gtttgagagtgagaaatcacgagttcaaaaaacatgatttattcaaaccgtcttcttcggaaggccccacagtgtgtggacagtaaagcttgcttcggcaagctttt

SEQ ID NO: 1645 - RNA, 67 nt, synthetic construct
  misc_feature 1..67: note = MG44-1 tracrRNA
  source 1..67: mol_type = other RNA
acaaggcaagttcaaataaaacttttgtctaatcacttttcgcaggtgcgaacactaacgctctttt

SEQ ID NO: 1646 - RNA, 98 nt, synthetic construct
  misc_feature 1..98: note = MG46-1 tracrRNA
  source 1..98: mol_type = other RNA
tcattaccctatagatttacactgcaagttcaaataatattattatgaatgcgtcagataactgacaaacacagtgcgtgttataaaaagtctatttt

SEQ ID NO: 1647 - RNA, 112 nt, synthetic construct
  misc_feature 1..112: note = MG71-1 tracrRNA
  source 1..112: mol_type = other RNA
ttgagtaccatcagaagttacatcacgagttcaaaaaacatgatttattcaaatcgtcttcttcagaagaccccacagtgtgtggaactaaagcttgcttcggcaggctttt

SEQ ID NO: 1648 - RNA, 113 nt, synthetic construct
  misc_feature 1..113: note = MG71-2 tracrRNA
  source 1..113: mol_type = other RNA
ttgagtaccatcagaagttacatcacgagttcaaaaaacatgatttattcaaaccgtcttcttcggaaggccccacagtgtgtggacagtaaagcttgcttcggcaagctttt

SEQ ID NO: 1649 - RNA, 129 nt, synthetic construct
  misc_feature 1..129: note = MG72-1 tracrRNA
  source 1..129: mol_type = other RNA
gtttaccaccatatgagttcacactacaagttcaaatcaaaatttattctaatcgctctccggagcctccacaagagtggatttacaaatgtaattatgaaaagacttatttttccgataagtcttttt

SEQ ID NO: 1650 - RNA, 96 nt, synthetic construct
  misc_feature 1..96: note = MG73-1 tracrRNA
  source 1..96: mol_type = other RNA
aaatctatcagtaagtcactataataagtgaaatcgcaaggctctgttcttgaacatcctttattataaaactcctgccaatcggttgggagtttt

SEQ ID NO: 1651 - RNA, 104 nt, synthetic construct
  misc_feature 1..104: note = MG73-2 tracrRNA
  source 1..104: mol_type = other RNA
attatacaataaacctatcagtaagctactgtaataagtgcaatcgcaaggctctgttcttgaacatcctttatttataactccggccaagtgcccggagtttt

SEQ ID NO: 1652 - RNA, 100 nt, synthetic construct
  misc_feature 1..100: note = MG74-1 tracrRNA
  source 1..100: mol_type = other RNA
ttagcagagggcagttgggagcgcaaccacggtaatcttttctgtggaaaagagctcctgtatggggatggattttaagatctgtccccatacatctttt

SEQ ID NO: 1653 - RNA, 91 nt, synthetic construct
  misc_feature 1..91: note = MG86-1 tracrRNA
  source 1..91: mol_type = other RNA
ttgtatgacacacaagtttaataggggtattaaactaaggtcactttttagtggctgactttagagtatggctttggctatactccatttt

SEQ ID NO: 1654 - RNA, 91 nt, synthetic construct
  misc_feature 1..91: note = MG86-2 tracrRNA
  source 1..91: mol_type = other RNA
ttgtatgacatggttgtttaataggggtattaaactaagactacgattttcgtagttgactttaggtgatggtttcgaccgtcaccctttt

SEQ ID NO: 1655 - RNA, 82 nt, synthetic construct
  misc_feature 1..82: note = MG87-1 tracrRNA
  source 1..82: mol_type = other RNA
ttggacattgccaaaaattattagttttcttattataactctttaatgaggaaaccgggactacccaaaggtagtctctttt

SEQ ID NO: 1656 - RNA, 73 nt, synthetic construct
  misc_feature 1..73: note = MG87-2 tracrRNA
  source 1..73: mol_type = other RNA
catattcaaatttaacaaagattcctattattacacgaatgtggaatccaaaaagagggttaatccctctttt

SEQ ID NO: 1657 - RNA, 81 nt, synthetic construct
  misc_feature 1..81: note = MG87-3 tracrRNA
  source 1..81: mol_type = other RNA
gttgcatatttctcaaattatacagggtttcctattataactcattatgaggaacccaaaagataccttcgggtatctttt

SEQ ID NO: 1658 - RNA, 97 nt, synthetic construct
  misc_feature 1..97: note = MG88-1 tracrRNA
  source 1..97: mol_type = other RNA
atcaagttggaattagatgtctagtcgttaataagaacctcttgcaagagaggagatttcaccattaaaaacggacacttcggtgtccgtttatttt

SEQ ID NO: 1659 - RNA, 84 nt, synthetic construct
  misc_feature 1..84: note = MG88-2 tracrRNA
  source 1..84: mol_type = other RNA
gtagcatattggttttagatgtctagtcgctaataagaaatttatttcgatattaagcccgattacttaggtagtcgggctttt

SEQ ID NO: 1660 - RNA, 92 nt, synthetic construct
  misc_feature 1..92: note = MG88-3 tracrRNA
  source 1..92: mol_type = other RNA
tatcggatttaaatgtcaagtagtcaataagaacaattcataatgtaaaatggctgagttcgcctcagccattttttgttgaatatcacaaa

SEQ ID NO: 1661 - RNA, 87 nt, synthetic construct
  misc_feature 1..87: note = MG89-2 tracrRNA
  source 1..87: mol_type = other RNA
attgtgacactgtaagggatttcaacgttgttacaataaggttttcgaaagattaccgaacccgccctcacttaggtgagggctttt

SEQ ID NO: 1662 - RNA, 108 nt, synthetic construct
  misc_feature 1..108: note = MG89-3 tracrRNA
  source 1..108: mol_type = other RNA
attgtagcattgtaagggaattagacgttgttacaataaggttttcgaaagattaccgtacccgaccccacttaggtggggtctttcattatataagtaactactttt

SEQ ID NO: 1663-1664 - skipped (2 entries)

SEQ ID NO: 1665 - DNA, 20 bp, synthetic construct
  misc_feature 1..20: note = MG71-2-AAVS1-target site-C3
  source 1..20: mol_type = other DNA
ggagagggtagcgcagggtg

SEQ ID NO: 1666 - DNA, 20 bp, synthetic construct
  misc_feature 1..20: note = MG71-2-AAVS1-target site-E2
  source 1..20: mol_type = other DNA
gccctgccaggacggggctg

SEQ ID NO: 1667 - skipped

SEQ ID NO: 1668 - DNA, 24 bp, synthetic construct
  misc_feature 1..24: note = MG73-1-TRAC-target site-G3
  source 1..24: mol_type = other DNA
tcttggttttacagatacgaacct

SEQ ID NO: 1669-1675 - skipped (7 entries)

SEQ ID NO: 1676 - DNA, 24 bp, synthetic construct
  misc_feature 1..24: note = MG89-2-TRAC-target site-F1
  source 1..24: mol_type = other DNA
atatccagaaccctgaccctgccg

SEQ ID NO: 1677 - DNA, 24 bp, synthetic construct
  misc_feature 1..24: note = MG89-2-TRAC-target site-G5
  source 1..24: mol_type = other DNA
ggccactttcaggaggaggattcg

SEQ ID NO: 1678 - DNA, 24 bp, synthetic construct
  misc_feature 1..24: note = MG89-2-TRAC-target site-E5
  source 1..24: mol_type = other DNA
cgcagcgtcatgagcagattaaac

SEQ ID NO: 1679 - DNA, 24 bp, synthetic construct
  misc_feature 1..24: note = MG89-2-TRAC-target site-F5
  source 1..24: mol_type = other DNA
cggccactttcaggaggaggattc

SEQ ID NO: 1680 - DNA, 24 bp, synthetic construct
  misc_feature 1..24: note = MG89-2-TRAC-target site-G1
  source 1..24: mol_type = other DNA
gccgtgtaccagctgagagactct

SEQ ID NO: 1681 - DNA, 24 bp, synthetic construct
  misc_feature 1..24: note = MG89-2-TRAC-target site-E1
  source 1..24: mol_type = other DNA
cccacagatatccagaaccctgac

SEQ ID NO: 1682 - DNA, 24 bp, synthetic construct
  misc_feature 1..24: note = MG89-2-TRAC-target site-B1
  source 1..24: mol_type = other DNA
atcctcttgtcccacagatatcca

1-105. (canceled)

106. An engineered nuclease system comprising:
(a) an endonuclease configured to have selectivity for a protospacer adjacent motif (PAM) sequence comprising nnnnCC, wherein said endonuclease is a class 2, type II Cas endonuclease and said endonuclease comprises a PAM-Interacting (PI) domain having at least 80% amino acid sequence identity to SEQ ID NO: 1633; and
(b) an engineered guide nucleic acid structure configured to form a complex with said endonuclease, wherein said engineered guide nucleic acid structure comprises:
(i) a targeting nucleic acid sequence configured to hybridize to a target deoxyribonucleic acid sequence; and
(ii) a tracr ribonucleic acid sequence configured to bind to said endonuclease.

107. The engineered nuclease system of claim 106, wherein said endonuclease further comprises one or more of: a RuvC domain or an HNH domain.

108. The engineered nuclease system of claim 107, wherein said RuvC domain comprises an amino acid sequence having at least 80% sequence identity to a RuvC domain of SEQ ID NO: 484.

109. The engineered nuclease system of claim 107, wherein said HNH domain comprises an amino acid sequence having at least 80% sequence identity to an HNH domain of SEQ ID NO: 484.

110. The engineered nuclease system of claim 106, wherein said tracr ribonucleic acid sequence comprises a sequence having at least 80% sequence identity to SEQ ID NO: 1661.

111. The engineered nuclease system of claim 106, wherein said engineered guide nucleic acid structure comprises a sequence having at least 80% sequence identity to SEQ ID NO: 584.

112. The engineered nuclease system of claim 106, wherein said targeting nucleic acid sequence comprises a spacer sequence configured to hybridize to a region of a TRAC locus or a region of an AAVS1 locus.

113. The engineered nuclease system of claim 112, wherein said engineered guide nucleic acid structure comprises a sequence having at least 80% sequence identity to any one of SEQ ID NOs: 1669-1675.

114. The engineered nuclease system of claim 112, wherein said target deoxyribonucleic acid sequence comprises a sequence having at least 80% sequence identity to at least 18 consecutive nucleotides of any one of SEQ ID NOs: 1676-1682, or a reverse complement thereof.

115. The engineered nuclease system of claim 106, wherein said endonuclease comprises an amino acid sequence comprising at least 80% sequence identity to SEQ ID NO: 484.

116. A method of editing a locus in a cell, said method comprising contacting to said cell:
(a) an endonuclease or a polynucleotide encoding said endonuclease, wherein said endonuclease is a class 2, type II Cas endonuclease, wherein said endonuclease is configured to have selectivity for a protospacer adjacent motif (PAM) sequence comprising nnnnCC and comprises a PAM-Interacting (PI) domain comprising an amino acid sequence having at least 80% sequence identity to SEQ ID NO: 1633; and
(b) an engineered guide nucleic acid structure or one or more polynucleotides encoding said engineered guide nucleic acid structure, wherein said engineered guide nucleic acid structure is configured to form a complex with said endonuclease and comprises:
(i) a targeting nucleic acid sequence configured to hybridize to a target deoxyribonucleic acid sequence in said cell; and
(ii) a tracr ribonucleic acid sequence configured to bind to said endonuclease.

117. The method of claim 116, wherein said endonuclease further comprises one or more of: a RuvC domain or an HNH domain.

118. The method of claim 117, wherein said RuvC domain comprises an amino acid sequence having at least 80% sequence identity to a RuvC domain of SEQ ID NO: 484.

119. The method of claim 117, wherein said HNH domain comprises an amino acid sequence having at least 80% sequence identity to an HNH domain of SEQ ID NO: 484.

120. The method of claim 116, wherein said tracr ribonucleic acid sequence comprises a sequence having at least 80% sequence identity to SEQ ID NO: 1661.

121. The method of claim 116, wherein said engineered guide nucleic acid structure comprises a sequence having at least 80% sequence identity to SEQ ID NO: 584.

122. The method of claim 116, wherein said locus is a TRAC locus or an AAVS1 locus.

123. The method of claim 122, said engineered guide nucleic acid structure comprises a sequence having at least 80% sequence identity to any one of SEQ ID NOs: 1669-1675.

124. The method of claim 122, wherein said target deoxyribonucleic acid sequence comprises a sequence having at least 80% sequence identity to at least 18 consecutive nucleotides of any one of SEQ ID NOs: 1676-1682, or a reverse complement thereof.

125. The method of claim 116, wherein said endonuclease comprises an amino acid sequence comprising at least 80% sequence identity to SEQ ID NO: 484.
